(19) United States
(12) Patent Application Publication
(10) Pub. No.: US 2025/0250588 A1
(43) Pub. Date: Aug. 7, 2025

(54) SYSTEMS AND METHODS FOR THE TREATMENT OF HEMOGLOBINOPATHIES

(71) Applicant: EDITAS MEDICINE, INC., Cambridge, MA (US)

(72) Inventors: Edouard AUPEPIN DE LAMOTHE-DREUZY, Boston, MA (US); KaiHsin CHANG, Medfield, MA (US); Minerva Elaine SANCHEZ, Brookline, MA (US); Jack HEATH, Winchester, MA (US)

(73) Assignee: EDITAS MEDICINE, INC., Cambridge, MA (US)

(21) Appl. No.: 18/747,309

(22) Filed: Jun. 18, 2024

Related U.S. Application Data
(63) Continuation of application No. 17/013,420, filed on Sep. 4, 2020, now abandoned.
Application No. 17/013,420 is a continuation of application No. PCT/US2019/021244, filed on Mar. 7, 2019.
(60) Provisional application No. 62/773,055, filed on Nov. 29, 2018.
(60) Provisional application No. 62/672,007, filed on May 15, 2018.
(60) Provisional application No. 62/639,968, filed on Mar. 7, 2018.

(51) Int. Cl. C12N 15/90; C12N 9/22; C12N 15/11

(52) U.S. Cl. CPC C12N 15/907; C12N 9/22; C12N 15/11; C12N 2310/20; C12N 2800/80

(57) ABSTRACT

Genome editing systems, guide RNAs, and CRISPR-mediated methods are provided for altering portions of the HBG1 and HBG2 loci in cells and increasing expression of fetal hemoglobin.

### CROSS REFERENCE TO RELATED APPLICATIONS

[0001] The present application is a continuation of U.S. application Ser. No. 17/013,420, filed Sep. 4, 2020, which is a continuation of International Application No. PCT/US2019/021244, filed Mar. 7, 2019; which claims the benefit of U.S. Provisional Application No. 62/639,968, filed Mar. 7, 2018; U.S. Provisional Application No. 62/672,007, filed May 15, 2018; and U.S. Provisional Application No. 62/773,055, filed Nov. 29, 2018; the contents of each of which is hereby incorporated by reference in its entirety.

### SEQUENCE LISTING

[0002] This application contains a ST.26 compliant Sequence Listing, which was submitted in XML format via Patent Center, and is hereby incorporated by reference in its entirety. The XML copy, created on Apr. 22, 2025, is named SubstituteSequenceListing.xml and is 2,150,000 bytes in size.

### FIELD

[0003] This disclosure relates to genome editing systems and methods for altering a target nucleic acid sequence, or modulating expression of a target nucleic acid sequence, and applications thereof in connection with the alteration of genes encoding hemoglobin subunits and/or treatment of hemoglobinopathies.

### BACKGROUND

[0004] Hemoglobin (Hb) carries oxygen in erythrocytes or red blood cells (RBCs) from the lungs to tissues. During prenatal development and until shortly after birth, hemoglobin is present in the form of fetal hemoglobin (HbF), a tetrameric protein composed of two alpha (α)-globin chains and two gamma (γ)-globin chains. HbF is largely replaced by adult hemoglobin (HbA), a tetrameric protein in which the γ-globin chains of HbF are replaced with beta (β)-globin chains, through a process known as globin switching. The average adult makes less than 1% HbF out of total hemoglobin (Thein 2009). The α-hemoglobin gene is located on chromosome 16, while the β-hemoglobin gene (HBB), A gamma (γA)-globin chain (HBG1, also known as gamma globin A), and G gamma (γG)-globin chain (HBG2, also known as gamma globin G) are located on chromosome 11 within the globin gene cluster (also referred to as the globin locus).

[0005] Mutations in HBB can cause hemoglobin disorders (i.e., hemoglobinopathies) including sickle cell disease (SCD) and beta-thalassemia (β-Thal). Approximately 93,000 people in the United States are diagnosed with a hemoglobinopathy. Worldwide, 300,000 children are born with hemoglobinopathies every year (Angastiniotis 1998). Because these conditions are associated with HBB mutations, their symptoms typically do not manifest until after globin switching from HbF to HbA.

[0006] SCD is the most common inherited hematologic disease in the United States, affecting approximately 80,000 people (Brousseau 2010). SCD is most common in people of African ancestry, for whom the prevalence of SCD is 1 in 500. In Africa, the prevalence of SCD is 15 million (Aliyu 2008). SCD is also more common in people of Indian, Saudi Arabian and Mediterranean descent. In those of Hispanic-American descent, the prevalence of sickle cell disease is 1 in 1,000 (Lewis 2014).

[0007] SCD is caused by a single homozygous mutation in the HBB gene, c.17A>T (HbS mutation). The sickle mutation is a point mutation (GAG>GTG) on HBB that results in substitution of valine for glutamic acid at amino acid position 6 in exon 1. The valine at position 6 of the β-hemoglobin chain is hydrophobic and causes a change in conformation of the β-globin protein when it is not bound to oxygen. This change of conformation causes HbS proteins to polymerize in the absence of oxygen, leading to deformation (i.e., sickling) of RBCs. SCD is inherited in an autosomal recessive manner, so that only patients with two HbS alleles have the disease. Heterozygous subjects have sickle cell trait, and may suffer from anemia and/or painful crises if they are severely dehydrated or oxygen deprived.

[0008] Sickle shaped RBCs cause multiple symptoms, including anemia, sickle cell crises, vaso-occlusive crises, aplastic crises, and acute chest syndrome. Sickle shaped RBCs are less elastic than wild-type RBCs and therefore cannot pass as easily through capillary beds and cause occlusion and ischemia (i.e., vaso-occlusion). Vaso-occlusive crisis occurs when sickle cells obstruct blood flow in the capillary bed of an organ leading to pain, ischemia, and necrosis. These episodes typically last 5-7 days. The spleen plays a role in clearing dysfunctional RBCs, and is therefore typically enlarged during early childhood and subject to frequent vaso-occlusive crises. By the end of childhood, the spleen in SCD patients is often infarcted, which leads to autosplenectomy. Hemolysis is a constant feature of SCD and causes anemia. Sickle cells survive for 10-20 days in circulation, while healthy RBCs survive for 90-120 days. SCD subjects are transfused as necessary to maintain adequate hemoglobin levels. Frequent transfusions place subjects at risk for infection with HIV, Hepatitis B, and Hepatitis C. Subjects may also suffer from acute chest crises and infarcts of extremities, end organs, and the central nervous system.

[0009] Subjects with SCD have decreased life expectancies. The prognosis for patients with SCD is steadily improving with careful, life-long management of crises and anemia. As of 2001, the average life expectancy of subjects with sickle cell disease was the mid-to-late 50's. Current treatments for SCD involve hydration and pain management during crises, and transfusions as needed to correct anemia.

[0010] Thalassemias (e.g., β-Thal, δ-Thal, and β/δ-Thal) cause chronic anemia. β-Thal is estimated to affect approximately 1 in 100,000 people worldwide. Its prevalence is higher in certain populations, including those of European descent, where its prevalence is approximately 1 in 10,000. β-Thal major, the more severe form of the disease, is life-threatening unless treated with lifelong blood transfusions and chelation therapy. In the United States, there are approximately 3,000 subjects with β-Thal major. β-Thal intermedia does not require blood transfusions, but it may cause growth delay and significant systemic abnormalities, and it frequently requires lifelong chelation therapy. Although HbA makes up the majority of hemoglobin in adult RBCs, approximately 3% of adult hemoglobin is in the form of HbA2, an HbA variant in which the two 7-globin chains are replaced with two delta (Δ)-globin chains. δ-Thal is associated with mutations in the A hemoglobin gene (HBD) that cause a loss of HBD expression. Co-inheritance of the HBD mutation can mask a diagnosis of β-Thal (i.e., β/δ-Thal) by decreasing the level of HbA2 to the normal range (Bouva 2006). β/δ-Thal is usually caused by deletion of the HBB and HBD sequences in both alleles. In homozygous (δo/δo βo/βo) patients, HBG is expressed, leading to production of HbF alone.

[0011] Like SCD, β-Thal is caused by mutations in the HBB gene. The most common HBB mutations leading to β-Thal are: c.−136C>G, c.92+1G>A, c.92+6T>C, c.93−21G>A, c.118C>T, c.316-106C>G, c.25_26delAA, c.27_28insG, c.92+5G>C, c.118C>T, c.135delC, c.315+1G>A, c.−78A>G, c.52A>T, c.59A>G, c.92+5G>C, c.124_127delTTCT, c.316-197C>T, c.−78A>G, c.52A>T, c.124_127delTTCT, c.316-197C>T, c.−138C>T, c.−79A>G, c.92+5G>C, c.75T>A, c.316-2A>G, and c.316-2A>C. These and other mutations associated with β-Thal cause mutated or absent β-globin chains, which causes a disruption of the normal Hb α-hemoglobin to β-hemoglobin ratio. Excess α-globin chains precipitate in erythroid precursors in the bone marrow.

[0012] In β-Thal major, both alleles of HBB contain nonsense, frameshift, or splicing mutations that leads to complete absence of β-globin production (denoted β⁰/β⁰). β-Thal major results in severe reduction in β-globin chains, leading to significant precipitation of α-globin chains in RBCs and more severe anemia.

[0013] β-Thal intermedia results from mutations in the 5′ or 3′ untranslated region of HBB, mutations in the promoter region or polyadenylation signal of HBB, or splicing mutations within the HBB gene. Patient genotypes are denoted βo/β+ or β+/β+. βo represents absent expression of a β-globin chain; β+ represents a dysfunctional but present β-globin chain. Phenotypic expression varies among patients. Since there is some production of β-globin, β-Thal intermedia results in less precipitation of α-globin chains in the erythroid precursors and less severe anemia than β-Thal major. However, there are more significant consequences of erythroid lineage expansion secondary to chronic anemia.

[0014] Subjects with β-Thal major present between the ages of 6 months and 2 years, and suffer from failure to thrive, fevers, hepatosplenomegaly, and diarrhea. Adequate treatment includes regular transfusions. Therapy for β-Thal major also includes splenectomy and treatment with hydroxyurea. If patients are regularly transfused, they will develop normally until the beginning of the second decade. At that time, they require chelation therapy (in addition to continued transfusions) to prevent complications of iron overload. Iron overload may manifest as growth delay or delay of sexual maturation. In adulthood, inadequate chelation therapy may lead to cardiomyopathy, cardiac arrhythmias, hepatic fibrosis and/or cirrhosis, diabetes, thyroid and parathyroid abnormalities, thrombosis, and osteoporosis. Frequent transfusions also put subjects at risk for infection with HIV, hepatitis B and hepatitis C.

[0015] β-Thal intermedia subjects generally present between the ages of 2-6 years. They do not generally require blood transfusions. However, bone abnormalities occur due to chronic hypertrophy of the erythroid lineage to compensate for chronic anemia. Subjects may have fractures of the long bones due to osteoporosis. Extramedullary erythropoiesis is common and leads to enlargement of the spleen, liver, and lymph nodes. It may also cause spinal cord compression and neurologic problems. Subjects also suffer from lower extremity ulcers and are at increased risk for thrombotic events, including stroke, pulmonary embolism, and deep vein thrombosis. Treatment of β-Thal intermedia includes splenectomy, folic acid supplementation, hydroxyurea therapy, and radiotherapy for extramedullary masses. Chelation therapy is used in subjects who develop iron overload.

[0016] Life expectancy is often diminished in β-Thal patients. Subjects with β-Thal major who do not receive transfusion therapy generally die in their second or third decade. Subjects with β-Thal major who receive regular transfusions and adequate chelation therapy can live into their fifth decade and beyond. Cardiac failure secondary to iron toxicity is the leading cause of death in β-Thal major subjects due to iron toxicity.

[0017] A variety of new treatments are currently in development for SCD and β-Thal. Delivery of an anti-sickling HBB gene via gene therapy is currently being investigated in clinical trials. However, the long-term efficacy and safety of this approach is unknown. Transplantation with hematopoietic stem cells (HSCs) from an HLA-matched allogeneic stem cell donor has been demonstrated to cure SCD and β-Thal, but this procedure involves risks including those associated with ablation therapy, which is required to prepare the subject for transplant, increases risk of life-threatening opportunistic infections, and risk of graft vs. host disease after transplantation. In addition, matched allogeneic donors often cannot be identified. Thus, there is a need for improved methods of managing these and other hemoglobinopathies.

### SUMMARY

[0018] Provided herein are genome editing systems, guide RNAs (gRNAs), and CRISPR-mediated methods for altering one or more γ-globin genes (e.g., HBG1, HBG2, or HBG1 and HBG2), the erythroid specific enhancer of the BCL11A gene (BCL11Ae), or a combination thereof, and increasing expression of fetal hemoglobin (HbF). In certain embodiments, genome editing systems, gRNAs, and CRISPR-mediated methods may alter a 13 nucleotide (nt) target region that is 5′ of the transcription site of the HBG1, HBG2, or HBG1 and HBG2 gene (“13 nt target region”), one or more regions set forth in Table 13, or a combination thereof. In certain embodiments, one or more gRNAs comprising a targeting domain set forth in SEQ ID NOs:251-901, 940-942, or Table 12 may be used to introduce alterations in the 13 nt target region. In certain embodiments, one or more gRNAs comprising a targeting domain set forth in Table 12 may be used to introduce alterations in one or more regions set forth in Table 13. In certain embodiments, genome editing systems, gRNAs, and CRISPR-mediated methods may alter a GATA1 binding motif in BCL11Ae that is in the +58 DNase I hypersensitive site (DHS) region of intron 2 of the BCL11A gene (“GATA1 binding motif in BCL11Ae”). In certain embodiments, one or more gRNAs comprising a targeting domain set forth in SEQ ID NOs:952-955 may be used to introduce alterations in the GATA1 binding motif in BCL11Ae. In certain embodiments, one or more gRNAs may be used to introduce alterations in the GATA1 binding motif in BCL11Ae and one or more gRNAs may be used to introduce alterations in the 13 nt target region of HBG1 and/or HBG2. In certain embodiments, genome editing systems, gRNAs, and CRISPR-mediated methods may alter a region within 50, 100, 200, 300, 400, or 500, 600, 700, 800, 900 or 1000 bp of a proximal HBG1/2 promoter sequence, including without limitation the 13 nt target region (“proximal HBG1/2 promoter target sequence”).

[0019] In certain embodiments, genome editing systems, gRNAs, and CRISPR-mediated methods set forth herein may alter one or more regions set forth in Table 13.

[0020] The inventors have also addressed a key unmet need in the field by identifying a strategy for increasing accessibility to the chromatin using an RNA-guided helicase and dead guide RNA to unwind the DNA within or proximal to the target region to be edited (e.g., the 13 nt target region, proximal HBG1/2 promoter target sequence, and/or the GATA1 binding motif in BCL11Ae). This disclosure provides new and effective means of unwinding chromatin and thereby increasing accessibility of target regions to RNA-guided nucleases. Also provided herein are genome editing systems, guide RNAs, and CRISPR-mediated methods for unwinding and altering portions of a genome. Unwinding of the genome may be achieved using an RNA-guided helicase and/or a dead guide RNA configured to target an RNA-guided enzyme to a target region in DNA but not to support a cleavage event.

[0021] In one aspect, the disclosure relates to genome editing systems that may include an RNA-guided nuclease, a first guide RNA and a second guide RNA. In certain embodiments, the first and second guide RNAs may include first and second targeting domains complimentary to first and second sequences on opposite sides of positions of a 13 nt target region of a human HBG1 or HBG2 gene. One or both of the first and second sequences may overlap the 13 nt target region of the human HBG1 or HBG2 gene. The genome editing system may also include a nucleic acid template encoding a deletion of the 13 nt region of the human HBG1 or HBG2 gene. In certain embodiments, the RNA-guided nuclease may be an S. pyogenes Cas9 or a nickase, which optionally lacks RuvC activity. The first and second targeting domains may be complimentary to sequences immediately adjacent to a protospacer adjacent motif recognized by S. pyogenes Cas9. In certain embodiments, the first targeting domain may be complimentary to a sequence within positions c. −1,114 to −114 of a human HBG1 or HBG2 gene. In certain embodiments, the first targeting domain may be complimentary to a sequence within positions c. −114 to 0 of a human HBG1 or HBG2 gene. In certain embodiments, at least one of the first and second targeting domains differ by no more than 3 nucleotides from a targeting domain listed in Table 7 or Table 12. The genome editing system may include first and second RNA-guided nucleases that, in some embodiments, are complexed with the first and second guide RNAs, respectively, forming first and second ribonucleoprotein complexes.

[0022] Continuing with this aspect of the disclosure, a genome editing system including any or all of the features described above may also include a third guide RNA, and optionally a fourth guide RNA. In certain embodiments, the third and fourth guide RNAs may include third and fourth targeting domains complimentary to third and fourth sequences on opposite sides of positions of a GATA1 binding motif in BCL11A erythroid enhancer (BCL11Ae) of a human BCL11A gene. One or both of the third and fourth sequences may optionally overlap the GATA1 binding motif in BCL11Ae of the human BCL11A gene. The genome editing systems may also include a nucleic acid template encoding a deletion of the GATA1 binding motif in BCL11Ae. In certain embodiments, the RNA-guided nuclease may be an S. pyogenes Cas9. In certain embodiments, the third and fourth targeting domains may be complimentary to sequences immediately adjacent to a protospacer adjacent motif recognized by S. pyogenes Cas9. In certain embodiments, the RNA-guided nuclease may be a nickase, which optionally lacks RuvC activity. In certain embodiments, the third targeting domain may be complimentary to a sequence within 1000 nucleotides upstream of the GATA1 binding motif in BCL11Ae. In certain embodiments, the third targeting domain may be complimentary to a sequence within 100 nucleotides upstream of the GATA1 binding motif in BCL11Ae. In certain embodiments, one of the third and fourth targeting domains may be complimentary to a sequence within 100 nucleotides downstream of the GATA1 binding motif in BCL11Ae. In certain embodiments, the fourth targeting domain may be complimentary to a sequence within 50 nucleotides downstream of the GATA1 binding motif in BCL11Ae. In certain embodiments, at least one of the third and fourth targeting domains differ by no more than 3 nucleotides from a targeting domain listed in Table 9. In certain embodiments, the genome editing systems may further include first and second RNA-guided nucleases. In certain embodiments, the first and second RNA-guided nucleases may be complexed with the third and fourth guide RNAs, respectively, forming third and fourth ribonucleoprotein complexes.

[0023] Continuing with this aspect of the disclosure, a genome editing system including any or all of the features described above may also include an RNA-guided helicase. In certain embodiments, the RNA-guided helicase may unwind nucleic acid within or proximate to the 13 nt target region or GATA1 binding motif in BCL11Ae of the human BCL11A gene. In certain embodiments, the RNA-guided helicase may be a fifth RNA-guided nuclease configured to lack nuclease activity. In certain embodiments, the RNA-guided nuclease may be complexed to a dead guide RNA including a fifth targeting domain of 15 or fewer nucleotides in length. In certain embodiments, the RNA-guided nuclease and dead guide RNA are not configured to recruit an exogenous trans-acting factor to the target region. In certain embodiments, the fifth targeting domain may be complimentary to a fifth sequence within or proximate to the 13 nt target region or GATA1 binding motif in BCL11Ae of the human BCL11A gene. In certain embodiments, the fifth targeting domain may include a nucleotide sequence that is identical to, or differs by no more than 1, 2, 3, 4, or 5 nucleotides from a nucleotide sequence set forth in Table 10. In certain embodiments, the fifth targeting domain may include a nucleotide sequence identical to the nucleotide sequence set forth in Table 10.

[0024] Another aspect of the disclosure relates to a method of altering a cell including contacting a cell with the genome editing systems described above and disclosed herein. In certain embodiments, the step of contacting the cell with the genome editing system may include contacting the cell with a solution including first and second ribonucleoprotein complexes. In certain embodiments, the step of contacting the cell with the solution may further include electroporating the cells, thereby introducing the first and second ribonucleoprotein complexes into the cell. In certain embodiments, the genome editing systems may further include contacting the cell with the genome editing system described above, in which the step of contacting the cell with the genome editing system may include contacting the cell with a solution including first, second, third, and optionally, fourth ribonucleoprotein complexes. In certain embodiments, the step of contacting the cell with the solution may further include electroporating the cells, thereby introducing the first, second, third, and optionally, fourth ribonucleoprotein complexes into the cell. In certain embodiments, the cell may be capable of differentiating into an erythroblast or a precursor of an erythroblast. In certain embodiments, the cell may be a CD34+ cell.

[0025] In one aspect, the disclosure relates to a CRISPR-mediated method of altering a cell including introducing a first DNA single strand break (SSB) or double strand break (DSB) within a genome of the cell between positions c. −614 to −102 of a human HBG1 or HBG2 gene and introducing a second SSB or DSB within the genome of the cell between positions c. −114 to −1 of the human HBG1 or HBG2 gene. In certain embodiments, the first and second SSBs or DSBs may be repaired by the cell in a manner that alters a 13 nt target region of the human HBG1 or HBG2 gene. In certain embodiments, the first and second SSBs or DSBs may be repaired by the cell in a manner that results in the deletion of all or part of a 13 nt target region of the human HBG1 or HBG2 gene. In certain embodiments, the first and second SSBs or DSBs may be repaired by the cell in a manner that results in the formation of at least one of an indel, a deletion, or an insertion in the 13 nt target region of the human HBG1 or HBG2 gene. In certain embodiments, the first and second SSBs or DSBs may be repaired by the cell in an error prone manner. In certain embodiments, the CRISPR-mediated method may further include introducing a third DNA single strand break (SSB) or double strand break (DSB) within 500 nucleotides upstream of a GATA1 binding motif in BCL11Ae of a human BCL11A gene and introducing a fourth SSB or DSB within the genome of the cell within 100 nucleotides downstream of the GATA1 binding motif in BCL11Ae of the human BCL11A gene. In certain embodiments, the third and fourth SSBs or DSBs may be repaired by the cell in a manner that alters the GATA1 binding motif in BCL11Ae of the human BCL11A gene. In certain embodiments, the third and fourth SSBs or DSBs may be repaired by the cell in a manner that results in the deletion of all or part of the GATA1 binding motif in BCL11Ae. In certain embodiments, the third and fourth SSBs or DSBs may be repaired by the cell in a manner that results in the formation of at least one of an indel, a deletion, or an insertion in the GATA1 binding motif in BCL11Ae. In certain embodiments, the third and fourth SSBs or DSBs may be repaired by the cell in an error prone manner.

[0026] In another aspect, the disclosure relates to CRISPR-mediated methods of altering a cell including introducing a first DNA single strand break (SSB) or double strand break (DSB) within a region of a genome of the cell set forth in Table 13. In certain embodiments, the first SSB or DSB may be repaired by the cell in a manner that alters the regulation of an HBG1 gene or an HBG2 gene. In certain embodiments, the first SSB or DSB may be repaired by the cell in a manner that results in the formation of at least one indel, insertion or deletion in the region set forth in Table 13.

[0027] Another aspect relates to a method of modifying one or more regions of interest in a HBG gene in a population of HSCs, comprising contacting the populations of cells ex vivo, in vivo or in vitro with an RNP complex comprising: a gRNA molecule; and an RNA-guided nuclease in which the one or more RNP complexes alters the one or more regions of interest in the HBG gene, and the one or more regions of interest is selected from a sequence set forth in Table 13. In certain embodiments, the alteration may result in the formation of at least one indel (e.g., insertion or deletion) in Region 6 or Region 7 set forth in Table 13.

[0028] Another aspect of this disclosure relates to a genome editing system including an RNA-guided nuclease and at least one guide RNA comprising (a) a targeting domain differing by no more than 3 nucleotides from a sequence set forth in Table 12; or (b) a targeting domain consisting of, or consisting essentially of, positions 5-20 of a sequence set forth in Table 12. In certain embodiments, the genome editing system may be configured to provide an editing event within a region set forth in Table 13. In certain embodiments, the genome editing system may further include a nucleic acid template encoding an alteration of the region set forth in Table 13. In certain embodiments, the RNA-guided nuclease may be a nickase, and optionally may lack RuvC activity. In certain embodiments, the genome editing system may further include a second guide RNA.

[0029] In certain embodiments, the gRNAs described herein may include one or more 2-o-methyl modifications, one or more phosphorothioate modifications, or a combination thereof.

[0030] In another aspect, this disclosure relates to a genome editing system configured to alter, e.g., by forming an SSB, DSB and/or an indel within, a region set forth in Table 13. In another aspect, this disclosure relates to a genome editing system comprising an RNA-guided nuclease and at least one gRNA configured to provide an editing event within one or more regions set forth in Table 13. The region is, in certain embodiments, selected from: Chr 11 (NC_000011.10): 5,247,883-5,248,186; 5,248,509-5,249,173; 5,249,198-5,249,362; 5,249,591-5,249,712; 5,249,904-5,249,927; 5,249,955-5,249,987, 5,250,040-5,250,075; 5,250,089-5,250,129; 5,250,141-5,250,254; 5,250,464-5,250,549; 5,250,594-5,250,735; 5,253,425-5,254,121; 5,254,122-5,254,306; 5,254,511-5,254,648; 5,254,829-5,254,866; 5,254,935-5,255,009; 5,255,025-5,255,053; 5,255,076-5,255,179; 5,255,255-5,255,292; and/or 5,255,518-5,255,641.

[0031] In certain embodiments, the genome editing systems include one or more guide RNAs comprising targeting domain sequences set forth in Table 12, and/or dead guide RNAs comprising nucleotide positions 5-20 of the targeting domain sequences set forth in Table 12. In certain embodiments, the genome editing systems include one or more guide RNAs comprising (a) a targeting domain differing by no more than 3 nucleotides from a sequence set forth in Table 12; or (b) a targeting domain consisting of, or consisting essentially of, positions 5-20 of a sequence set forth in Table 12. In certain embodiments, the genome editing systems include one or more guide RNAs comprising (a) the targeting domain differing by no more than 3 nucleotides from a Tier 1 or Tier 2 targeting domain sequence set forth in Table 12; or (b) the targeting domain consisting of, or consisting essentially of, positions 5-20 of a Tier 1 or Tier 2 targeting domain sequence set forth in Table 12. In certain embodiments, the genome editing system includes at least one guide RNA comprising (a) the targeting domain differing by no more than 3 nucleotides from a targeting domain sequence set forth in Table 17; or (b) the targeting domain consisting of, or consisting essentially of, positions 5-20 of a targeting domain sequence set forth in Table 17. In certain embodiments, the genome editing system includes at least one guide RNA comprising a gRNA sequence set forth in Table 17. In certain embodiments, the gRNA comprises one or more 2-o-methyl modifications, one or more phosphorothioate modifications, or a combination thereof. In certain embodiments, the RNA-guided nuclease may be a Cas9 molecule. In certain embodiments, the RNA-guided nuclease may be a nickase, and optionally lacks RuvC activity. In certain embodiments, the genome editing system further comprises a second guide RNA.

[0032] In one aspect, the disclosure relates to compositions including a plurality of cells generated by the method disclosed above, in which at least 20%, 30%, 40%, 50%, 60%, 70%, 80% or 90% of the cells include an alteration of a sequence of a 13 nt target region of the human HBG1 or HBG2 gene or a plurality of cells generated by the method disclosed above, wherein at least 20%, 30%, 40%, 50%, 60%, 70%, 80% or 90% of the cells include an alteration of a sequence of a 13 nt target region of the human HBG1 or HBG2 gene and at least 20%, 30%, 40%, 50%, 60%, 70%, 80% or 90% of the cells include an alteration of a sequence of the GATA1 binding motif in BCL11Ae. In one aspect, the disclosure relates to compositions including a plurality of cells generated by the genome editing systems disclosed above, in which at least 20%, 30%, 40%, 50%, 60%, 70%, 80%, or 90% of the cells comprise one or more alterations of one or more sequences set forth in Table 13. In certain embodiments, the alteration may result in the formation of at least one indel (e.g., insertion or deletion) in Region 6 or Region 7 as set forth in Table 13. In certain embodiments, at least a portion of the plurality of cells may be within an erythroid lineage. In certain embodiments, the plurality of cells may be characterized by an increased level of fetal hemoglobin expression relative to an unmodified plurality of cells. In certain embodiments, the level of fetal hemoglobin may be increased by at least 20%, 30%, 40%, 50%, 60%, 70%, 80% or 90%. In certain embodiments, the compositions may further include a pharmaceutically acceptable carrier.

[0033] In one aspect, the disclosure relates to compositions including a population of cells generated by any one of the methods disclosed herein, wherein the cells comprise a higher frequency of an alteration of a sequence of an HBG1 gene, HBG2 gene, or both set forth in the region relative to an unmodified population of cells. In certain embodiments, the higher frequency may be at least about 10%, 20%, 30%, 40%, 50%, 60%, 70%, 80% or 90% higher. In certain embodiments, at least a portion of the population of cells are within an erythroid lineage.

[0034] In one aspect, the disclosure relates to a population of cells modified by the genome editing system disclosed above, in which the population of cells comprise a higher percentage of a productive indel relative to a population of cells not modified by the genome editing system.

[0035] In one aspect, the disclosure relates to an isolated cell comprising a modification in an HBG gene sequence generated by the delivery of a RNP complex comprising an RNA-guided nuclease and a synthetic gRNA molecule that targets the HBG gene sequence within one or more regions selected from Chr 11 (NC_000011.10): 5,247,883-5,248,186; 5,248,509-5,249,173; 5,249,198-5,249,362; 5,249,591-5,249,712; 5,249,904-5,249,927; 5,249,955-5,249,987, 5,250,040-5,250,075; 5,250,089-5,250,129; 5,250,141-5,250,254; 5,250,464-5,250,549; 5,250,594-5,250,735; 5,253,425-5,254,121; 5,254,122-5,254,306; 5,254,511-5,254,648; 5,254,829-5,254,866; 5,254,935-5,255,009; 5,255,025-5,255,053; 5,255,076-5,255,179; 5,255,255-5,255,292; and/or 5,255,518-5,255,641.

[0036] In one aspect, the disclosure relates to a population of CD34+ cells or hematopoietic stem cells (HSCs), with one or more cells comprising a disruption in one or more regions of the HBG gene, wherein the disruption is generated using an RNP complex comprising a CRISPR/RNA-guided nuclease and a synthetic gRNA that targets one or more regions of the HBG gene selected from Chr 11 (NC_000011.10): 5,247,883-5,248,186; 5,248,509-5,249,173; 5,249,198-5,249,362; 5,249,591-5,249,712; 5,249,904-5,249,927; 5,249,955-5,249,987, 5,250,040-5,250,075; 5,250,089-5,250,129; 5,250,141-5,250,254; 5,250,464-5,250,549; 5,250,594-5,250,735; 5,253,425-5,254,121; 5,254,122-5,254,306; 5,254,511-5,254,648; 5,254,829-5,254,866; 5,254,935-5,255,009; 5,255,025-5,255,053; 5,255,076-5,255,179; 5,255,255-5,255,292; and/or 5,255,518-5,255,641.

[0037] In one aspect, the disclosure relates to a population of cells modified by the genome editing system disclosed above, in which a higher percentage of the population of cells are capable of differentiating into a population of cells of an erythroid lineage that express HbF relative to a population of cells not modified by the genome editing system. In certain embodiments, the higher percentage may be at least about 15%, at least about 20%, at least about 25%, at least about 30%, or at least about 40% higher. In certain embodiments, the cells may be hematopoietic stem cells. In certain embodiments, the cells may be capable of differentiating into an erythroblast, erythrocyte, or a precursor of an erythrocyte or erythroblast.

[0038] In one aspect, the disclosure relates to methods for treating a subject with a hemoglobinopathy, the method including the steps of: isolating a hematopoietic progenitor cell from the subject providing a patient specific HSC; contacting the cell with a genome editing system disclosed herein; and implanting the cell into the subject.

[0039] In one aspect, the disclosure relates to methods of administering a population of cells to a subject, wherein the population of cells comprises an alteration in an HBG gene sequence generated by the delivery of a complex comprising an RNA-guided nuclease and a gRNA molecule that alters one or more regions of the HBG gene selected from Chr 11 (NC_000011.10): 5,247,883-5,248,186; 5,248,509-5,249,173; 5,249,198-5,249,362; 5,249,591-5,249,712; 5,249,904-5,249,927; 5,249,955-5,249,987, 5,250,040-5,250,075; 5,250,089-5,250,129; 5,250,141-5,250,254; 5,250,464-5,250,549; 5,250,594-5,250,735; 5,253,425-5,254,121; 5,254,122-5,254,306; 5,254,511-5,254,648; 5,254,829-5,254,866; 5,254,935-5,255,009; 5,255,025-5,255,053; 5,255,076-5,255,179; 5,255,255-5,255,292; and/or 5,255,518-5,255,641.

[0040] In one aspect, the disclosure relates to methods for increasing the level of fetal hemoglobin (HbF) in a human cell, the method comprising contacting the cell with: an RNA-guided nuclease; and at least one guide RNA configured to provide an editing event within one or more regions selected from Chr 11 (NC_000011.10): 5,247,883-5,248,186; 5,248,509-5,249,173; 5,249,198-5,249,362; 5,249,591-5,249,712; 5,249,904-5,249,927; 5,249,955-5,249,987, 5,250,040-5,250,075; 5,250,089-5,250,129; 5,250,141-5,250,254; 5,250,464-5,250,549; 5,250,594-5,250,735; 5,253,425-5,254,121; 5,254,122-5,254,306; 5,254,511-5,254,648; 5,254,829-5,254,866; 5,254,935-5,255,009; 5,255,025-5,255,053; 5,255,076-5,255,179; 5,255,255-5,255,292; and/or 5,255,518-5,255,641. In certain embodiments, the guide RNAs may comprise a targeting domain sequence set forth in Table 12. In certain embodiments, the gRNA may comprise (a) a targeting domain differing by no more than 3 nucleotides from a sequence set forth in Table 12; or (b) a targeting domain consisting of, or consisting essentially of, positions 5-20 of a sequence set forth in Table 12. In certain embodiments, the gRNA may comprise (a) the targeting domain differing by no more than 3 nucleotides from a Tier 1 or Tier 2 targeting domain sequence set forth in Table 12; or (b) the targeting domain consisting of, or consisting essentially of, positions 5-20 of a Tier 1 or Tier 2 targeting domain sequence set forth in Table 12. In certain embodiments, the gRNA may comprise (a) the targeting domain differing by no more than 3 nucleotides from a targeting domain sequence set forth in Table 17; or (b) the targeting domain consisting of, or consisting essentially of, positions 5-20 of a targeting domain sequence set forth in Table 17. In certain embodiments, the gRNA may comprise a gRNA sequence set forth in Table 17. In certain embodiments, the gRNA may comprise one or more 2-o-methyl modifications, one or more phosphorothioate modifications, or a combination thereof.

[0041] In one aspect, the disclosure relates to a synthetic guide RNA molecule comprising (a) a targeting domain differing by no more than 3 nucleotides from a sequence set forth in Table 12; or (b) a targeting domain consisting of, or consisting essentially of, positions 5-20 of a sequence set forth in Table 12. In certain embodiments, a synthetic gRNA molecule further comprises (a) the targeting domain differing by no more than 3 nucleotides from a Tier 1 or Tier 2 targeting domain sequence set forth in Table 12; or (b) the targeting domain consisting of, or consisting essentially of, positions 5-20 of a Tier 1 or Tier 2 targeting domain sequence set forth in Table 12. In certain embodiments, the targeting domain may comprise a Tier 1 or Tier 2 gRNA set forth in Table 12. In certain embodiments, the targeting domain may differ by no more than 3 nucleotides from a targeting domain sequence set forth in Table 17; or the targeting domain may consists of, or may consists essentially of, positions 5-20 of a targeting domain sequence set forth in Table 17. In certain embodiments, the targeting domain may comprise a gRNA targeting domain sequence set forth in Table 17. In certain embodiments, a synthetic gRNA may comprise one or more 2-o-methyl modifications, one or more phosphorothioate modifications, or a combination thereof.

[0042] This listing is intended to be exemplary and illustrative rather than comprehensive and limiting. Additional aspects and embodiments may be set out in, or apparent from, the remainder of this disclosure and the claims.

### BRIEF DESCRIPTION OF THE DRAWINGS

[0043] The accompanying drawings are intended to provide illustrative, and schematic rather than comprehensive, examples of certain aspects and embodiments of the present disclosure. The drawings are not intended to be limiting or binding to any particular theory or model, and are not necessarily to scale. Without limiting the foregoing, nucleic acids and polypeptides may be depicted as linear sequences, or as schematic two- or three-dimensional structures; these depictions are intended to be illustrative rather than limiting or binding to any particular model or theory regarding their structure.

[0044] FIG. 1 depicts, in schematic form, HBG1 and HBG2 gene(s) in the context of the γ-globin gene cluster on human chromosome 11. FIG. 1. Each gene in the γ-globin gene cluster is transcriptionally regulated by a proximal promoter. While not wishing to be bound by any particular theory, it is generally thought that A_{γ} and/or G_{γ} expression is activated by engagement between the proximal promoter with the distal strong erythroid-specific enhancer, the locus control region (LCR). Long-range transactivation by the LCR is thought to be mediated by alteration of chromatin configuration/confirmation. The LCR is marked by 4 erythroid specific DNase I hypersensitive sites (HS1-4) and 2 distal enhancer elements (5′ HS and 3′ HS1). γ-like gene globin gene expression is regulated in a developmental stage-specific manner, and expression of globin genes changes coincide with changes in the main site of blood production.

[0045] FIGS. 2A-2B depict HBG1 and HBG2 genes, coding sequences (CDS) and small deletions and point mutations in and upstream of the HBG1 and HBG2 proximal promoters that have been identified in patients and associated with elevation of fetal hemoglobin (HbF). Core elements within the proximal promoters (CAAT box, 13 nt sequence) that have been deleted in some patients with hereditary persistence of fetal hemoglobin (HPFH). The ‘target sequence’ region of each locus, which has been screened for gRNA binding target sites, is also identified.

[0046] FIGS. 3A-C show data from gRNA screening for incorporation of the 13 nt deletion in human K562 erythroleukemia cells. FIG. 3A Gene editing as determined by T7E1 endonuclease assay analysis (referred to interchangeably as a “T7E1 analysis”) of HBG1 and HBG2 locus-specific PCR products amplified from genomic DNA extracted from K562 cells after electroporation with DNA encoding S. pyogenes-specific gRNAs and plasmid DNA encoding S. pyogenes Cas9. FIG. 3B Gene editing as determined by DNA sequence analysis of PCR products amplified from the HBG1 locus in genomic DNA extracted from K562 cells after electroporation with DNA encoding the indicated gRNA and Cas9 plasmid. FIG. 3C Gene editing as determined by DNA sequence analysis of PCR products amplified from the HBG2 locus in genomic DNA extracted from K562 cells after electroporation with DNA encoding the indicated gRNA and Cas9 plasmid. For FIG. 3B-C, the types of editing events (insertions, deletions) and subtypes of deletions (13 nt target partially [12 nt HPFH] or fully [13-26 nt HPFH] deleted, other sequences deleted [other deletions]) are indicated by the differently shaded/patterned bars.

[0047] FIGS. 4A-C depict results of gene editing in human cord blood (CB) and human adult CD34⁺ cells after electroporation with RNPs complexed to in vitro transcribed S. pyogenes gRNAs that target a specific 13 nt sequence for deletion (HBG sgRNAs Sp35 and Sp37). FIG. 4A depicts the percentage of indels detected by T7E1 analysis of HBG1 and HBG2 specific PCR products amplified from gDNA extracted from CB CD34⁺ cells treated with the indicated RNPs or donor matched untreated control cells (n=3 CB CD34⁺ cells, 3 separate experiments). Data shown represent the mean and error bars correspond to standard deviation across the 3 separate donors/experiments. FIG. 4B depicts the percentage of indels detected by T7E1 analysis of HBG2 specific PCR product amplified from gDNA extracted from CB CD34⁺ cells or adult CD34⁺ cells treated with the indicated RNPs or donor matched untreated control cells (n=3 CB CD34⁺ cells, n=3 mobilized peripheral blood (mPB) CD34⁺ cells, 3 separate experiments). Data shown represent the mean and error bars correspond to standard deviation across the 3 separate donors/experiments. FIG. 4C (Top panel) depicts indels as detected by T7E1 analysis of HBG2 PCR products amplified from gDNA extracted from human CB CD34⁺ cells electroporated with HBG Sp35 RNP or HBG Sp37 RNP+/−ssODN (unmodified or with PhTx modified 5′ and 3′ ends). The lower left panel shows the level of gene editing as determined by Sanger DNA sequence analysis of gDNA from cells edited with HBF Sp37 RNP and ssODN. The lower right panel shows the specific types of deletions detected within total deletions.

[0048] FIGS. 5A-B depict gene editing of HBG in adult human mobilized peripheral blood (mPB) CD34⁺ cells and induction of fetal hemoglobin in erythroid progeny of RNP treated cells after electroporation of mPB CD34⁺ cells with HBG Sp37 RNP+/−ssODN encoding the 13 nt deletion. FIG. 5A depicts the percentage of indels detected by T7E1 analysis of HBG2 PCR product amplified from gDNA extracted from mPB CD34⁺ cells treated with the RNP or donor matched untreated control cells. FIG. 5B depicts the fold change in HBG mRNA expression in day 7 erythroblasts that were differentiated from RNP treated and untreated donor matched control mPB CD34⁺ cells. mRNA levels are normalized to GAPDH and calibrated to the levels detected in untreated controls on the corresponding days of differentiation.

[0049] FIGS. 6A-B depict the ex vivo differentiation potential of RNP treated and untreated mPB CD34⁺ cells from the same donor. FIG. 6A shows hematopoietic myeloid/erythroid colony forming cell (CFC) potential, where the number and subtype of colonies are indicated (GEMM: granulocyte-erythroid-monocyte-macrophage colony, E: erythroid colony, GM: granulocyte-macrophage colony, M: macrophage colony, G: granulocyte colony). FIG. 6B depicts the percentage of Glycophorin A expressed over the time course of erythroid differentiation as determined by flow cytometry analysis at the indicated time points and for the indicated samples.

[0050] FIG. 7A depicts indels detected by T7E1 analysis of HBG PCR product amplified from gDNA extracted from human mPB CD34⁺ cells treated with HBG RNPs (D10A paired nickases). For a subset of samples, cells also received ssODN encoding the 13 nt deletion plus silent SNPs to monitor for HDR (ssODN). FIG. 7B depicts DNA sequencing analysis for select subset of samples shown in FIG. 7A. The indels were subdivided according to the type of indel (insertion, 13 nt deletion, or other deletion).

[0051] FIG. 8A depicts the indels at the HBG target site after electroporation of mPB CD34⁺ cells with the indicated pairs of gRNAs complexed in D10A nickase and WT RNP pairs. FIG. 8B depicts the large deletion events (e.g., deletion of HBG2) after electroporation of mPB CD34⁺ cells with the indicated pairs of gRNAs complexed in D10A nickase and WT RNPs. FIG. 8C depicts DNA sequencing analysis and the subtypes of events (insertions, deletions) detected in gDNA from mPB CD34⁺ cells treated with paired D10A nickase pairs. FIG. 8D depicts DNA sequencing analysis and the subtypes of events (insertions, deletions) detected in gDNA from mPB CD34⁺ cells treated with paired WT RNP pairs.

[0052] FIG. 9 depicts the summary of HbF protein and mRNA expression in the progeny of mPB CD34⁺ cells treated with paired RNPs targeting HBG, for the experiments shown in FIGS. 7 and 8. HbF protein (by HPLC analysis) and HbF mRNA expression (ddPCR analysis) were evaluated in erythroid progeny of RNP treated human mPB CD34⁺ cells (background levels of HbF detected in donor matched untreated controls were subtracted from the levels detected in progeny of RNP treated CD34⁺ cells).

[0053] FIGS. 10A-H depict the indel frequencies and ex vivo and in vivo short-term hematopoietic potential of CD34⁺ cells after treatment with different concentrations (0, 2.5, 3.75 M) of paired D10A nickase RNPs (SpA+Sp85). Indels were evaluated by T7E1 analysis (FIG. 10A) and by Illumina sequencing analysis (insertions and deletions, FIG. 10B). FIG. 10C depicts the % of HbF protein detected by HPLC analysis (% HbF=100%×HbF/(HbF+HbA). FIG. 10D depicts the hematopoietic activity of the RNP treated and donor matched untreated control CD34⁺ cells in colony forming cell (CFC) assays. CFCs shown are per thousand CD34⁺ cells plated. FIG. 10E depicts human blood CD45⁺ cell reconstitution of the peripheral blood in immunodeficient mice (NSG) 1 month after transplantation with donor matched human mPB CD34⁺ that were either untreated (O M), or treated with one of two doses (2.5 and 3.75 M) of D10A RNP and paired gRNAs. FIG. 10F depicts human blood CD45⁺ cell reconstitution of the peripheral blood in immunodeficient mice (NSG) 2 months after transplantation. FIGS. 10G and 10H depict the lineage distributions following human CD45⁺ blood cell reconstitution of NSG mice at 1 month (FIG. 10G) and 2 months (FIG. 10H).

[0054] FIG. 11a correlates HbF levels as assayed by HPLC and indel frequency as assessed by T7E1 analysis for two D10A nickase RNP pairs (SP37+SPB and SP37+SPA) delivered at the indicated concentrations to mPB CD34⁺ cells. HbF levels were analyzed in erythroid progeny (day 18) of edited CD34⁺ cells. HbF protein detected in donor-matched untreated controls were subtracted from edited samples. FIG. 11b depicts indel rates overlaid on hematopoietic colony forming cell (CFC) activity associated with CD34⁺ cells treated with the indicated D10A nickase pairs or untreated controls. FIG. 11c depicts human CD45⁺ blood cell reconstitution of immunodeficient NSG mice one month after transplantation of mPB CD34⁺ cells treated with indicated D10 RNP nickase pairs at the concentrations given or donor matched untreated controls. FIG. 11d depicts the human blood lineage distribution detected in the human CD45⁺ fraction in mouse peripheral blood one month post-transplant.

[0055] FIG. 12 depicts a target site for derepression of HbF, the GATA1 motif of the +58 DNase I hypersensitive site (DHS) erythroid specific enhancer of BCL11A (BCL11Ae) (genomic coordinates: chr2: 60,495,265 to 60,495,270).

[0056] FIG. 13A depicts the percentage of indels detected by T7E1 endonuclease analysis of BCL11A PCR products amplified from gDNA extracted from CB CD34⁺ cells treated with the indicated RNP+/−ssODN or donor matched untreated control cells. Data shown represent the mean of three 3 separate donors/experiments. FIG. 13B depicts indels detected by T7E1 endonuclease analysis of BCL11A PCR products amplified from gDNA extracted from CB CD34⁺ cells treated with the indicated WT RNP (single gRNA targeting the BCL11A erythroid enhancer complexed to WT S. pyogenes Cas9 having both RuvC and HNH activity) or paired nickase RNP (paired gRNAs targeting the BCL11A erythroid enhancer (BCL11Ae) complexed to S. pyogenes Cas9 nickases sharing the same HNH single stranded cutting activity (e.g., D10A), as well as the hematopoietic activity of cells in each condition.

[0057] FIG. 14A depicts the editing frequency of BCL11Ae (using single gRNA approach targeting the GATA1 motif) in adult human BM CD34⁺ cells. FIG. 14B depicts the monoallelic and bialleleic editing detected in hematopoietic colonies (GEMMs, clonal progeny of BCL11Ae RNP treated CD34⁺ cells) as determined by DNA sequencing analysis. FIG. 14C depicts the kinetics of erythroblast maturation (enucleation as determined by DRAQ5⁻ cells detected by flow cytometry analysis). FIG. 14D depicts the acquisition of erythroid phenotype (Glycophorin A⁺ cells) in differentiated control and RNP-treated BM CD34⁺ cells, while FIG. 14E shows the fold increase in HbF⁺ cells as determined by flow cytometry analysis relative to HbF+ cells in untreated donor matched control samples.

[0058] FIGS. 15A-C depict gene editing of BCL11Ae in adult human mPB CD34⁺ cells and induction of fetal hemoglobin in erythroid progeny of RNP and ssODN treated cells after electroporation of mPB CD34⁺ cells with BCL11Ae RNP+nonspecific ssODN (i.e., no homology to BCL11Ae target region). FIG. 15A depicts the percentage of indels detected by T7E1 analysis of HBG2 PCR product amplified from gDNA extracted from mPB CD34⁺ cells treated with the BCL11Ae RNP and nonspecific ssODN or donor matched untreated control cells. FIG. 15B depicts the fold change in HBG mRNA expression in day 10 erythroblasts that were differentiated from BCL11Ae RNP treated and untreated donor matched control mPB CD34⁺ cells (mRNA levels are normalized to GAPDH and calibrated to the levels detected in untreated controls on the corresponding days of differentiation). FIG. 15C depicts the percentage of Glycophorin A expressed over the time course of erythroid differentiation of mPB CD34⁺ cells+/−treatment with BCL11Ae RNP and nonspecific ssODN, as determined by flow cytometry analysis at the indicated time points and for the indicated samples.

[0059] FIG. 16 depicts a schematic of the −110 nt target region in the gamma hemoglobin gene (HBG) promoter (grey box) and the relative locations of homologous sequences to dead gRNAs (dgRNAs) and wild-type gRNAs. dgRNAs that have a truncated targeting domain sequence and do not promote Cas9 cutting are depicted (i.e., Sp181 dgRNA and truncated (t)SpA dgRNA, Table 10) as white arrows. gRNAs that have a full-length targeting domain sequence, which promote Cas9 cutting are depicted as black arrows (i.e., Sp35 and Sp37 gRNAs, Table 10).

[0060] FIG. 17 shows the percentage of edits determined by T7E1 endonuclease analysis of HBG2 PCR product amplified from genomic DNA (gDNA) extracted from mobilized peripheral blood (mPB) CD34⁺ cells after codelivery of a dead ribonucleoprotein (dRNP) (i.e., SpA dRNP) and a wild-type (WT) RNP (i.e., Sp37 RNP). tSpA dRNP comprises WT Cas9 protein complexed to a truncated gRNA (tSpA dgRNA, Table 10) (i.e., dead (d)RNA15-mer version of SpA) and Sp37 RNP comprises WT Cas9 protein complexed to gRNA Sp37 (Table 10).

[0061] FIG. 18 depicts the percentage of edits detected by T7E1 analysis of HBG PCR product amplified from gDNA extracted from mPB CD34⁺ cells after delivery of Sp35 RNP alone (i.e., Sp35 gRNA complexed with WT Cas 9 protein)) or codelivery of Sp35 RNP and dRNPs that target the same or opposite DNA strand as Sp35 RNP (i.e., Sp181 dRNP (Sp181 dgRNA complexed with WT Cas9 protein) and tSpA dRNP (tSpA dgRNA complexed with WT Cas9 protein)) (see also FIG. 16). Black bars indicate the level of indels detected in the mPB CD34⁺ cells. White bars indicate the level of indels detected in the mPB CD34⁺ cells maintained in the day 7 erythroid progeny of edited cells.

[0062] FIG. 19 shows a schematic of the variety of insertions and deletions resulting from double strand breaks repaired through NHEJ. Each unique edit (e.g., insertion or deletion) may serve as a unique identifier (or “barcode”) for an individual cell or clone of cells descended therefrom.

[0063] FIG. 20 depicts a graphical rank ordering of the most abundant edited alleles in pre-infusion human HSCs and in lineages or tissue populations derived from long-term engrafting cells from two experimental replicates at 16-weeks post-infusion. Genomic DNA from cells electroporated with a ribonucleoprotein complex targeting the HBB locus was harvested and sequencing reads were aligned to an unedited or WT reference sequence. The frequency of individual edited alleles among the total number of reads from each sample was quantified and ranked. White and grey bars represent to five most abundant unique alleles in each sample, with white bars representing the most abundant unique allele, and less frequent alleles being represented by progressively darker shades of grey. Black bars represent unique alleles outside of the top 5 in terms of frequency. These data indicate that the most frequent alleles in each sample represent a comparatively small fraction of the total reads, and that the distribution of reads varies across lineages or tissue populations derived from the same pre-infusion pool, indicating that diversity of edited alleles is preserved in long-term engrafting HSCs and their progeny.

[0064] FIG. 21 depicts a graphical rank-ordering of the abundance of edited alleles in pre-infusion human HSCs and in lineages or tissue populations derived from long-term engrafting cells in two experimental replicates at 16-weeks post-infusion. Editing and analysis were performed as described for FIG. 20, but the white bars correspond to the edited allele observed at the highest frequency in the pre-infusion edited HSC sample, and progressively darker bars correspond to less frequently observed alleles in the pre-infusion sample. Bars of the same color represent the same edited allele in each sample. Black bars represent unique alleles outside of the top 5 in any of the samples shown. The figure indicates that the frequency of individual alleles in tissue populations or lineages derived from long-term engrafting HSCs varies from the frequency of the same alleles in pre-infusion samples, consistent with the relatively low level of representation of long-term engrafting HSCs in the bulk CD34+ cell population.

[0065] FIG. 22 depicts, in schematic form, the genomic region encompassing the beta globin locus on human chromosome 11 that was screened to identify cis-regulatory elements involved in the regulation of fetal globin expression. The bottom panel depicts the coverage of gRNA library where each black vertical line represents one gRNA.

[0066] FIG. 23 depicts the average enrichment in the pool of high-HbF expressing cells (over low HbF-expressing cells) of the lentiviral sequence encoding gRNAs classified as Tier 1, Tier 2, Tier 3, Tier 4, and Friend of Tier 1 (as determined by sequencing analysis of the lentiviral PCR amplicon from the cell pool gDNA extracts) (Table 12). The Y axis shows the average Log 2 enrichment value from four bioreplicates. The X axis shows the standard deviation of average enrichment. Each dot represents one gRNA.

[0067] FIG. 24 depicts the average enrichment in the pool of high-HbF expressing cells (over low HbF-expressing cells) of the lentiviral sequence encoding the gRNAs included in the screen. Each dot represents one gRNA, positioned on the X axis according to the genomic coordinate (Hg38) of its cut site (Hg38).

[0068] FIGS. 25A-B depicts the positions, lengths, frequencies, and HbF enrichment scores of individual indels generated by gRNAs from Table 12. The HbF enrichment score represents the ratio of the frequency of an indel in the pool of high-HbF expressing cells over its frequency in the pool of low HbF-expressing cells (as determined by sequencing analysis of the HBG1, HBG2, or HBG1-2 PCR amplicon from the pool gDNA extracts). The genomic coordinates (Hg38) of the center of the indels are indicated by the value on the X-axis. FIG. 25A depicts the indels mapped to HBG1 (or HBG1 and HBG2 where the sequence is perfectly homologous). FIG. 25B similarly depicts the indels mapped to HBG2 (or HBG1 and HBG2 where the sequence is perfectly homologous). For FIGS. 25A-B, the Y-axis of the top panels depict the length of the indels where a positive number indicates an insertion and a negative number indicates a deletion. The Y-axis on the bottom panel depicts the average Log 2 HbF enrichment score (average of two biological replicates). Each dot represents one unique indel. The size of the dot represents the average frequency of the indel (average of two biological replicates). Indels enriched in the high-HbF expressing fraction are represented as black dots, other indels are represented as light grey dots.

[0069] FIG. 26 depicts the coverage by high HbF-enriched indels and non-enriched indel at each genomic position at Hg38 Chr11: 5,249,805-5,250,352. The coverage of genomic positions by high HbF-enriched indels is shown as dark grey and the non-enriched indels are shown as light grey (see Example 10). Briefly, gRNA were complexed as RNP and delivered to HUDEP-2 cells by electroporation. Following erythroid differentiation, High HbF expressing cells and low HbF expressing cells were separated by FACS (Fluorescence activated cell sorting). Following genomic DNA extraction, PCR amplification of the target regions and NGS sequencing, the count of indels enriched or not-enriched in the high-HbF fraction (over the low HbF fraction) was calculated for each genomic position. FIG. 26 shows an example of one region analyzed. Only indels with spanning 10 or less nucleotides were included in the analysis. Several genomic position covered by high frequency of HbF-enriched indels were identified.

[0070] FIG. 27 depicts the average relative fold change in gamma globin mRNA expression as measured by qRT-PCR (Y-axis) following RNP transfection of HUDEP2 cells, plotted against the average Log 2 HbF enrichment score following lentiviral transduction of HUDEP2 cells. Each dot represents one gRNA.

[0071] FIGS. 28A-C depict the engraftment outcomes of mock-transfected (no gRNA) or RNP #3 (comprising gRNA #3 targeting domain (SEQ ID NO:295, Table 18), complexed with S. Pyogenes wild-type Cas9)-transfected mPB CD34+ cells. FIG. 28A depicts the frequency of individual populations of CD19+, CD15+, GlyA+, and Lin-CD34+ cells (lineage cocktail includes antibodies against CD3, CD14, CD16, CD19, CD20, CD56 markers, Lin-CD34+ cells are defined as CD34+ cells that are negative for CD3, CD14, CD16, CD20, or CD56 marker expression) from bone marrow (BM) of nonirradiated NOD,B6.SCID Il2rγ−/− Kit(W41/W41) (“NBSGW”) mice infused with mock (no gRNA) or RNP #3 transfected mPB CD34+ cells. Chimerism is defined as human CD45/(human CD45+mCD45). The frequency of GlyA+ cells was calculated as GlyA+ cells/total cells. All other markers were calculated as marker+ cells/human CD45+ cells. FIG. 28B depicts the indels of unfractionated BM or flow-sorted individual populations of CD15+, CD19+, GlyA+, and Lin-CD34+ cells in mock-transfected (no gRNA added) or RNP #3 transfected cells. FIG. 28C depicts the HbF expression, calculated as gamma/beta-like (%) by erythroid cells following an 18-day erythroid differentiation culture from total BM.

### DETAILED DESCRIPTION

### Definitions and Abbreviations

[0072] Unless otherwise specified, each of the following terms has the meaning associated with it in this section.

[0073] The indefinite articles “a” and “an” refer to at least one of the associated noun, and are used interchangeably with the terms “at least one” and “one or more.” For example, “a module” means at least one module, or one or more modules.

[0074] The conjunctions “or” and “and/or” are used interchangeably as non-exclusive disjunctions.

[0075] “Domain” is used to describe a segment of a protein or nucleic acid. Unless otherwise indicated, a domain is not required to have any specific functional property.

[0076] The term “exogenous trans-acting factor” refers to any peptide or nucleotide component of a genome editing system that both (a) interacts with an RNA-guided nuclease or gRNA by means of a modification, such as a peptide or nucleotide insertion or fusion, to the RNA-guided nuclease or gRNA, and (b) interacts with a target DNA to alter a helical structure thereof. Peptide or nucleotide insertions or fusions may include, without limitation, direct covalent linkages between the RNA-guided nuclease or gRNA and the exogenous trans-acting factor, and/or non-covalent linkages mediated by the insertion or fusion of RNA/protein interaction domains such as MS2 loops and protein/protein interaction domains such as a PDZ, Lim or SH1, 2 or 3 domains. Other specific RNA and amino acid interaction motifs will be familiar to those of skill in the art. Trans-acting factors may include, generally, transcriptional activators.

[0077] An “indel” is an insertion and/or deletion in a nucleic acid sequence. An indel may be the product of the repair of a DNA double strand break, such as a double strand break formed by a genome editing system of the present disclosure. An indel is most commonly formed when a break is repaired by an “error prone” repair pathway such as the NHEJ pathway described below.

[0078] “Gene conversion” refers to the alteration of a DNA sequence by incorporation of an endogenous homologous sequence (e.g., a homologous sequence within a gene array). “Gene correction” refers to the alteration of a DNA sequence by incorporation of an exogenous homologous sequence, such as an exogenous single-or double stranded donor template DNA. Gene conversion and gene correction are products of the repair of DNA double-strand breaks by HDR pathways such as those described below.

[0079] Indels, gene conversion, gene correction, and other genome editing outcomes are typically assessed by sequencing (most commonly by “next-gen” or “sequencing-by-synthesis” methods, though Sanger sequencing may still be used) and are quantified by the relative frequency of numerical changes (e.g., ±1, ±2 or more bases) at a site of interest among all sequencing reads. DNA samples for sequencing may be prepared by a variety of methods known in the art, and may involve the amplification of sites of interest by polymerase chain reaction (PCR), the capture of DNA ends generated by double strand breaks, as in the GUIDEseq process described in Tsai 2016 (incorporated by reference herein) or by other means well known in the art. Genome editing outcomes may also be assessed by in situ hybridization methods such as the FiberComb™ system commercialized by Genomic Vision (Bagneux, France), and by any other suitable methods known in the art.

[0080] “Alt-HDR,” “alternative homology-directed repair,” or “alternative HDR” are used interchangeably to refer to the process of repairing DNA damage using a homologous nucleic acid (e.g., an endogenous homologous sequence, e.g., a sister chromatid, or an exogenous nucleic acid, e.g., a template nucleic acid). Alt-HDR is distinct from canonical HDR in that the process utilizes different pathways from canonical HDR, and can be inhibited by the canonical HDR mediators, RAD51 and BRCA2. Alt-HDR is also distinguished by the involvement of a single-stranded or nicked homologous nucleic acid template, whereas canonical HDR generally involves a double-stranded homologous template.

[0081] “Canonical HDR,” “canonical homology-directed repair” or “cHDR” refer to the process of repairing DNA damage using a homologous nucleic acid (e.g., an endogenous homologous sequence, e.g., a sister chromatid, or an exogenous nucleic acid, e.g., a template nucleic acid). Canonical HDR typically acts when there has been significant resection at the double strand break, forming at least one single stranded portion of DNA. In a normal cell, cHDR typically involves a series of steps such as recognition of the break, stabilization of the break, resection, stabilization of single stranded DNA, formation of a DNA crossover intermediate, resolution of the crossover intermediate, and ligation. The process requires RAD51 and BRCA2, and the homologous nucleic acid is typically double-stranded.

[0082] Unless indicated otherwise, the term “HDR” as used herein encompasses both canonical HDR and alt-HDR.

[0083] “Non-homologous end joining” or “NHEJ” refers to ligation mediated repair and/or non-template mediated repair including canonical NHEJ (cNHEJ) and alternative NHEJ (altNHEJ), which in turn includes microhomology-mediated end joining (MMEJ), single-strand annealing (SSA), and synthesis-dependent microhomology-mediated end joining (SD-MMEJ).

[0084] “Replacement” or “replaced,” when used with reference to a modification of a molecule (e.g., a nucleic acid or protein), does not require a process limitation but merely indicates that the replacement entity is present.

[0085] “Subject” means a human, mouse, or non-human primate. A human subject can be any age (e.g., an infant, child, young adult, or adult), and may suffer from a disease, or may be in need of alteration of a gene.

[0086] “Treat,” “treating,” and “treatment” mean the treatment of a disease in a subject (e.g., a human subject), including one or more of inhibiting the disease, i.e., arresting or preventing its development or progression; relieving the disease, i.e., causing regression of the disease state; relieving one or more symptoms of the disease; and curing the disease.

[0087] “Prevent,” “preventing,” and “prevention” refer to the prevention of a disease in a subject, including (a) avoiding or precluding the disease; (b) affecting the predisposition toward the disease; or (c) preventing or delaying the onset of at least one symptom of the disease.

[0088] A “kit” refers to any collection of two or more components that together constitute a functional unit that can be employed for a specific purpose. By way of illustration (and not limitation), one kit according to this disclosure can include a gRNA complexed or able to complex with an RNA-guided nuclease, and accompanied by (e.g., suspended in, or suspendable in) a pharmaceutically acceptable carrier. The kit can be used to introduce the complex into, for example, a cell or a subject, for the purpose of causing a desired genomic alteration in such cell or subject. The components of a kit can be packaged together, or they may be separately packaged. Kits according to this disclosure also optionally include directions for use (DFU) that describe the use of the kit e.g., according to a method of this disclosure. The DFU can be physically packaged with the kit, or it can be made available to a user of the kit, for instance by electronic means.

[0089] The terms “polynucleotide”, “nucleotide sequence”, “nucleic acid”, “nucleic acid molecule”, “nucleic acid sequence”, and “oligonucleotide” refer to a series of nucleotide bases (also called “nucleotides”) in DNA and RNA, and mean any chain of two or more nucleotides. The polynucleotides, nucleotide sequences, nucleic acids etc. can be chimeric mixtures or derivatives or modified versions thereof, single-stranded or double-stranded. They can be modified at the base moiety, sugar moiety, or phosphate backbone, for example, to improve stability of the molecule, its hybridization parameters, etc. A nucleotide sequence typically carries genetic information, including, but not limited to, the information used by cellular machinery to make proteins and enzymes. These terms include double- or single-stranded genomic DNA, RNA, any synthetic and genetically manipulated polynucleotide, and both sense and antisense polynucleotides. These terms also include nucleic acids containing modified bases.

[0090] Conventional IUPAC notation is used in nucleotide sequences presented herein, as shown in Table 1, below (see also Cornish-Bowden 1985, incorporated by reference herein). It should be noted, however, that “T” denotes “Thymine or Uracil” in those instances where a sequence may be encoded by either DNA or RNA, for example in gRNA targeting domains.

TABLE 1
IUPAC nucleic acid notation

| Character | Base |
|---|---|
| A | Adenine |
| T | Thymine |
| G | Guanine |
| C | Cytosine |
| U | Uracil |
| K | G or T/U |
| M | A or C |
| R | A or G |
| Y | C or T/U |
| S | C or G |
| W | A or T/U |
| B | C, G or T/U |
| V | A, C or G |
| H | A, C or T/U |
| D | A, G or T/U |
| N | A, C, G or T/U |

[0091] The terms “protein,” “peptide” and “polypeptide” are used interchangeably to refer to a sequential chain of amino acids linked together via peptide bonds. The terms include individual proteins, groups or complexes of proteins that associate together, as well as fragments or portions, variants, derivatives and analogs of such proteins. Peptide sequences are presented herein using conventional notation, beginning with the amino or N-terminus on the left, and proceeding to the carboxyl or C-terminus on the right. Standard one-letter or three-letter abbreviations can be used.

[0092] In some embodiments, a guide RNA (gRNA) sequence that comprises a targeting domain hybridizes (or is complementary) to the target sequence within the target region, e.g., either the “+”, “−” strand of the target region. In some embodiments, a genome editing system that comprises an RNA-guided nuclease and a gRNA is configured to bind to the target sequence to affect cleavage or an editing event within a target region, e.g., one or both strands of the target region.

[0093] The notations “c.−114 to −102 region,” “13 nt target region” and the like refer to a sequence that is 5′ of the transcription start site (TSS) of the HBG1 and/or HBG2 gene. The c.−114 to −102 region is exemplified in SEQ ID NO:902 at positions 2824-2836, and SEQ ID NO:903 at positions 2748-2760. The term “13 nt deletion” and the like refer to deletions of the 13 nt target region.

[0094] The term “proximal HBG1/2 promoter target sequence” denotes the region within 50, 100, 200, 300, 400, or 500 bp of a proximal HBG1/2 promoter sequence including the 13 nt target region. Alterations by genome editing systems according to this disclosure facilitate (e.g., cause, promote or tend to increase the likelihood of) upregulation of HbF production in erythroid progeny.

[0095] The term “GATA1 binding motif in BCL11Ae” refers to the sequence that is the GATA1 binding motif in the erythroid specific enhancer of BCL11A (BCL11Ae) that is in the +58 DNase I hypersensitive site (DHS) region of intron 2 of the BCL11A gene. The genomic coordinates for the GATA1 binding motif in BCL11Ae are chr2: 60,495,265 to 60,495,270. The +58 DHS site comprises a 115 base pair (bp) sequence as set forth in SEQ ID NO:968. The +58 DHS site sequence, including ˜500 bp upstream and ˜200 bp downstream is set forth in SEQ ID NO:969.

[0096] Where ranges are provided herein, endpoints are included. Furthermore, it is to be understood that unless otherwise indicated or otherwise evident from the context and/or the understanding of one of ordinary skill in the art, values that are expressed as ranges can assume any specific value within the stated ranges in different embodiments of the invention, to the tenth of the unit of the lower limit of the range, unless the context clearly dictates otherwise. It is also to be understood that unless otherwise indicated or otherwise evident from the context and/or the understanding of one of ordinary skill in the art, values expressed as ranges can assume any subrange within the given range, wherein the endpoints of the subrange are expressed to the same degree of accuracy as the tenth of the unit of the lower limit of the range.

### Overview

[0097] The various embodiments of this disclosure generally relate to genome editing systems configured to introduce alterations (e.g., a deletion or insertion, or other mutation) into chromosomal DNA that enhance transcription of the HBG1 and/or HBG2 genes, which encode the γA and γG subunits of hemoglobin, respectively. Exemplary mutations are made in or around one or more regions set forth in Table 13, the 13 nt target region, and/or into the GATA1 binding motif in BCL11Ae of HBG1 and/or HBG2. In some embodiments, a gRNA sequence that comprises a targeting domain hybridizes (or is complementary) to the target sequence within the target region, e.g., either the “+”, “−” strand of the target region. In some embodiments, a genome editing system that comprises an RNA-guided nuclease and a gRNA is configured to bind to the target sequence to affect cleavage or an editing event within a target region, e.g., one or both strands of the target region (e.g., in or around one or more regions set forth in Table 13, the 13 nt target region, and/or into the GATA1 binding motif in BCL11Ae of HBG1 and/or HBG2).

### Targeted Genome Editing for Fetal Hemoglobin Induction

[0098] Fetal hemoglobin (HbF) expression can be induced using various genome strategies. For example, HbF expression can be induced through targeted disruption of the 13 nt target region, proximal HBG1/2 promoter target sequence, and or the erythroid cell specific expression of a transcriptional repressor, BCL11A (BCL11Ae) (also discussed in commonly-assigned International Patent Publication No. WO 2015/148860 by Friedland et al. (“Friedland”), published Oct. 1, 2015, which is incorporated by reference in its entirety herein), which encodes a repressor that silences HBG1 and HBG2 (Canvers 2015). In certain embodiments, the region of BCL11Ae targeted for disruption may be the GATA1 binding motif in BCL11Ae. In certain embodiments, genome editing systems disclosed herein may be used to introduce alterations into the GATA1 binding motif in BCL11Ae and the 13 nt target region of HBG1 and/or HBG2. In certain embodiments, genome editing systems disclosed herein may be used to introduce alterations into one or more regions disclosed in Table 13.

[0099] The genome editing systems of this disclosure can include an RNA-guided nuclease such as Cas9 or Cpf1 and one or more gRNAs having a targeting domain that is complementary to a sequence in or near the target region, and optionally one or more of a DNA donor template that encodes a specific mutation (such as a deletion or insertion) in or near the target region, and/or an agent that enhances the efficiency with which such mutations are generated including, without limitation, a random oligonucleotide, a small molecule agonist or antagonist of a gene product involved in DNA repair or a DNA damage response, or a peptide agent.

[0100] A variety of approaches to the introduction of mutations into one or more regions set forth in Table 13, the 13 nt target region, proximal HBG1/2 promoter target sequence, and/or the GATA1 binding motif in BCL11Ae may be employed in the embodiments of the present disclosure. In one approach, a single alteration, such as a double-strand break, is made within one or more regions set forth in Table 13, the 13 nt target region, proximal HBG1/2 promoter target sequence, and/or the GATA1 binding motif in BCL11Ae, and is repaired in a way that disrupts the function of the region, for example by the formation of an indel or by the incorporation of a donor template sequence that encodes the deletion of the region. In a second approach, two or more alterations are made on either side of the region, resulting in the deletion of the intervening sequence, including the 13 nt target region and/or the GATA1 binding motif in BCL11Ae.

[0101] The treatment of hemoglobinopathies by gene therapy and/or genome editing is complicated by the fact that the cells that are phenotypically affected by the disease, erythrocytes or RBCs, are enucleated, and do not contain genetic material encoding either the aberrant hemoglobin protein (Hb) subunits nor the γA or γG subunits targeted in the exemplary genome editing approaches described above. This complication is addressed, in certain embodiments of this disclosure, by the alteration of cells that are competent to differentiate into, or otherwise give rise to, erythrocytes. Cells within the erythroid lineage that are altered according to various embodiments of this disclosure include, without limitation, hematopoietic stem and progenitor cells (HSCs), erythroblasts (including basophilic, polychromatic and/or orthochromatic erythroblasts), proerythroblasts, polychromatic erythrocytes or reticulocytes, embryonic stem (ES) cells, and/or induced pluripotent stem (iPSC) cells. These cells may be altered in situ (e.g., within a tissue of a subject) or ex vivo. Implementations of genome editing systems for in situ and ex vivo alteration of cells is described under the heading “Implementation of genome editing systems: delivery, formulations, and routes of administration” below.

[0102] In certain embodiments, alterations that result in induction of γA and/or γG expression or induction of HbF expression are obtained through the use of a genome editing system comprising an RNA-guided nuclease and at least one gRNA having a targeting domain that alters a sequence in one or more regions set forth in Table 13 or proximate thereto (e.g., within 10, 20, 30, 40, or 50, 100, 200, 300, 400 or 500 bases of the one or more regions). As is discussed in greater detail below, the RNA-guided nuclease and gRNA form a complex that is capable of associating with and altering one or more regions set forth in Table 13 or a region proximate thereto. Examples of suitable targeting domains directed to one or more regions set forth in Table 13 or proximate thereto for use in the embodiments disclosed herein include, without limitation, those set forth in Table 12. In some embodiments, a gRNA sequence that comprises a targeting domain hybridizes (or is complementary) to the target sequence within the target region, e.g., either the “+”, “−” strand of the target region. In some embodiments, a genome editing system that comprises an RNA-guided nuclease and a gRNA is configured to bind to the target sequence to effect cleavage or an editing event within a target region, e.g., one or both strands of the target region (e.g., in or around one or more regions set forth in Table 13).

[0103] In certain embodiments, alterations that result in induction of γA and/or γG expression are obtained through the use of a genome editing system comprising an RNA-guided nuclease and at least one gRNA having a targeting domain complementary to a sequence within the 13 nt target region of HBG1 and/or HBG2 or proximate thereto (e.g., within 10, 20, 30, 40, or 50, 100, 200, 300, 400 or 500 bases of the 13 nt target region). As is discussed in greater detail below, the RNA-guided nuclease and gRNA form a complex that is capable of associating with and altering the 13 nt target region or a region proximate thereto. Examples of suitable targeting domains directed to the 13 nt target region of HBG1 and/or HBG2 or proximate thereto for use in the embodiments disclosed herein include, without limitation, those set forth in SEQ ID NOs:251-901, 940-942.

[0104] In certain embodiments, alterations that result in induction of HbF expression are obtained through the use of a genome editing system comprising an RNA-guided nuclease and at least one gRNA having a targeting domain complementary to a sequence within the GATA1 binding motif in BCL11Ae or proximate thereto (e.g., within 10, 20, 30, 40, or 50, 100, 200, 300, 400 or 500 bases of the GATA1 binding motif in BCL11Ae). In certain embodiments, the RNA-guided nuclease and gRNA form a complex that is capable of associating with and altering the GATA1 binding motif in BCL11Ae. Examples of suitable targeting domains directed to the GATA1 binding motif in BCL11Ae for use in the embodiments disclosed herein include, without limitation, those set forth in SEQ ID NOs:952-955.

[0105] The genome editing system can be implemented in a variety of ways, as is discussed below in detail. As an example, a genome editing system of this disclosure can be implemented as a ribonucleoprotein complex or a plurality of complexes in which multiple gRNAs are used. This ribonucleoprotein complex can be introduced into a target cell using art-known methods, including electroporation, as described in commonly-assigned International Patent Publication No. WO 2016/182959 by Jennifer Gori (“Gori”), published Nov. 17, 2016, which is incorporated by reference in its entirety herein.

[0106] The ribonucleoprotein complexes within these compositions are introduced into target cells by art-known methods, including without limitation electroporation (e.g., using the Nucleofection™ technology commercialized by Lonza, Basel, Switzerland or similar technologies commercialized by, for example, Maxcyte Inc. Gaithersburg, Maryland) and lipofection (e.g., using Lipofectamine™ reagent commercialized by Thermo Fisher Scientific, Waltham Massachusetts). Alternatively, or additionally, ribonucleoprotein complexes are formed within the target cells themselves following introduction of nucleic acids encoding the RNA-guided nuclease and/or gRNA. These and other delivery modalities are described in general terms below and in Gori.

[0107] Cells that have been altered ex vivo according to this disclosure can be manipulated (e.g., expanded, passaged, frozen, differentiated, de-differentiated, transduced with a transgene, etc.) prior to their delivery to a subject. The cells are, variously, delivered to a subject from which they are obtained (in an “autologous” transplant), or to a recipient who is immunologically distinct from a donor of the cells (in an “allogeneic” transplant).

[0108] In some cases, an autologous transplant includes the steps of obtaining, from the subject, a plurality of cells, either circulating in peripheral blood, or within the marrow or other tissue (e.g., spleen, skin, etc.), and manipulating those cells to enrich for cells in the erythroid lineage (e.g., by induction to generate iPSCs, purification of cells expressing certain cell surface markers such as CD34, CD90, CD49f and/or not expressing surface markers characteristic of non-erythroid lineages such as CD10, CD14, CD38, etc.). The cells are, optionally or additionally, expanded, transduced with a transgene, exposed to a cytokine or other peptide or small molecule agent, and/or frozen/thawed prior to transduction with a genome editing system targeting one or more regions set forth in Table 13, the 13 nt target region, proximal HBG1/2 promoter target sequence, and/or the GATA1 binding motif in BCL11Ae. The genome editing system can be implemented or delivered to the cells in any suitable format, including as a ribonucleoprotein complex, as separated protein and nucleic acid components, and/or as nucleic acids encoding the components of the genome editing system.

[0109] In certain embodiments, CD34+ hematopoietic stem and progenitor cells (HSPCs) that have been edited using the genome editing methods disclosed herein may be used for the treatment of a hemoglobinopathy in a subject in need thereof. In certain embodiments, the hemoglobinopathy may be severe sickle cell disease (SCD) or thalassemia, such as β-thalassemia, δ-thalassemia, or β/δ-thalassemia. In certain embodiments, an exemplary protocol for treatment of a hemoglobinopathy may include harvesting CD34+ HSPCs from a subject in need thereof, ex vivo editing of the autologous CD34+ HSPCs using the genome editing methods disclosed herein, followed by reinfusion of the edited autologous CD34+ HSPCs into the subject. In certain embodiments, treatment with edited autologous CD34+ HSPCs may result in increased HbF induction.

[0110] Prior to harvesting CD34+ HSPCs, in certain embodiments, a subject may discontinue treatment with hydroxyurea, if applicable, and receive blood transfusions to maintain sufficient hemoglobin (Hb) levels. In certain embodiments, a subject may be administered intravenous plerixafor (e.g., 0.24 mg/kg) to mobilize CD34+ HSPCs from bone marrow into peripheral blood. In certain embodiments, a subject may undergo one or more leukapheresis cycles (e.g., approximately one month between cycles, with one cycle defined as two plerixafor-mobilized leukapheresis collections performed on consecutive days). In certain embodiments, the number of leukapheresis cycles performed for a subject may be the number required to achieve a dose of edited autologous CD34+ HSPCs (e.g., ≥2×10⁶ cells/kg, ≥3×10⁶ cells/kg, ≥4×10⁶ cells/kg, ≥5×10⁶ cells/kg, 2×10⁶ cells/kg to 3×10⁶ cells/kg, 3×10⁶ cells/kg to 4×10⁶ cells/kg, 4×10⁶ cells/kg to 5×10⁶ cells/kg) to be reinfused back into the subject, along with a dose of unedited autologous CD34+ HSPCs/kg for backup storage (e.g., >1.5×10⁶ cells/kg). In certain embodiments, the CD34+ HSPCs harvested from the subject may be edited using any of the genome editing methods discussed herein. In certain embodiments, any one or more of the gRNAs and one or more of the RNA-guided nucleases disclosed herein may be used in the genome editing methods.

[0111] In certain embodiments, the treatment may include an autologous stem cell transplant. In certain embodiments, a subject may undergo myeloablative conditioning with busulfan conditioning (e.g., dose-adjusted based on first-dose pharmacokinetic analysis, with a test dose of 1 mg/kg). In certain embodiments, conditioning may occur for four consecutive days. In certain embodiments, following a three-day busulfan washout period, edited autologous CD34+ HSPCs (e.g., ≥2×10⁶ cells/kg, ≥3×10⁶ cells/kg, ≥4×10⁶ cells/kg, ≥5×10⁶ cells/kg, 2×10⁶ cells/kg to 3×10⁶ cells/kg, 3×10⁶ cells/kg to 4×10⁶ cells/kg, 4×10⁶ cells/kg to 5×10⁶ cells/kg) may be reinfused into the subject (e.g., into peripheral blood). In certain embodiments, the edited autologous CD34+ HSPCs may be manufactured and cryopreserved for a particular subject. In certain embodiments, a subject may attain neutrophil engraftment following a sequential myeloablative conditioning regimen and infusion of edited autologous CD34⁺ cells. Neutrophil engraftment may be defined as three consecutive measurements of ANC≥0.5×10⁹/L.

[0112] However it is implemented, a genome editing system may include, or may be co-delivered with, one or more factors that improve the viability of the cells during and after editing, including without limitation an aryl hydrocarbon receptor antagonist such as StemRegenin-1 (SR1), UM171, LGC0006, alpha-napthoflavone, and CH-223191, and/or an innate immune response antagonist such as cyclosporin A, dexamethasone, reservatrol, a MyD88 inhibitory peptide, an RNAi agent targeting Myd88, a B18R recombinant protein, a glucocorticoid, OxPAPC, a TLR antagonist, rapamycin, BX795, and a RLR shRNA. These and other factors that improve the viability of the cells during and after editing are described in Gori, under the heading “I. Optimization of Stem Cells” from page 36 through page 61, which is incorporated by reference herein.

[0113] The cells, following delivery of the genome editing system, are optionally manipulated e.g., to enrich for HSCs and/or cells in the erythroid lineage and/or for edited cells, to expand them, freeze/thaw, or otherwise prepare the cells for return to the subject. The edited cells are then returned to the subject, for instance in the circulatory system by means of intravenous delivery or delivery or into a solid tissue such as bone marrow.

[0114] Functionally, alteration of one or more regions set forth in Table 13, the 13 nt target region, proximal HBG1/2 promoter target sequence, and/or the GATA1 binding motif in BCL11Ae using the compositions, methods and genome editing systems of this disclosure results in significant induction, among hemoglobin-expressing cells, of TA and/or 7G subunits (referred to interchangeably as HbF expression), e.g., at least 5%, 10%, 15%, 20%, 25%, 30%, 35%, 40%, 45%, 50% or greater induction of γA and/or γG subunit expression relative to unmodified controls. This induction of protein expression is generally the result of alteration of one or more regions set forth in Table 13, the 13 nt target region, proximal HBG1/2 promoter target sequence, and/or the GATA1 binding motif in BCL11Ae (expressed, e.g., in terms of the percentage of total genomes comprising indel mutations within the plurality of cells) in some or all of the plurality of cells that are treated, e.g., at least 5%, 10%, 15%, 20%, 25%, 30%, 35%, 40%, 45%, 50% of the plurality of cells comprise at least one allele comprising a sequence alteration, including, without limitation, an indel, insertion, or deletion in or near one or more regions set forth in Table 13, the 13 nt target region, proximal HBG1/2 promoter target sequence, and/or the GATA1 binding motif in BCL11Ae.

[0115] The functional effects of alterations caused or facilitated by the genome editing systems and methods of the present disclosure can be assessed in any number of suitable ways. For example, the effects of alterations on expression of fetal hemoglobin can be assessed at the protein or mRNA level. Expression of HBG1 and HBG2 mRNA can be assessed by digital droplet PCR (ddPCR), which is performed on cDNA samples obtained by reverse transcription of mRNA harvested from treated or untreated samples. Primers for HBG1, HBG2, HBB, and/or HBA may be used individually or multiplexed using methods known in the art. For example, ddPCR analysis of samples may be conducted using the QX200™ ddPCR system commercialized by Bio Rad (Hercules, CA), and associated protocols published by BioRad. Fetal hemoglobin protein may be assessed by high pressure liquid chromatography (HPLC), for example, according to the methods discussed on pp. 143-44 of Chang 2017, incorporated by reference herein, or fast protein liquid chromatography (FPLC) using ion-exchange and/or reverse phase columns to resolve HbF, HbB and HbA and/or γA and γG globin chains as is known in the art.

[0116] It should be noted that the rate at which one or more regions set forth in Table 13, the 13 nt target region, proximal HBG1/2 promoter target sequence, and/or the GATA1 binding motif in BCL11Ae is altered in the target cells can be modified by the use of optional genome editing system components such as oligonucleotide donor templates. Donor template design is described in general terms below under the heading “Donor template design.” Donor templates for use in targeting the 13 nt target region may include, without limitation, donor templates encoding alterations (e.g., deletions) of HBG1 c.−114 to −102 (corresponding to nucleotides 2824-2836 of SEQ ID NO: 902), HBG1 c.−225 to −222 (corresponding to nucleotides 2716-2719 of SEQ ID NO:902)), and/or HBG2 c.−114 to −102 (corresponding to nucleotides 2748-2760 of SEQ ID NO:903). Exemplary 5′ and 3′ homology arms, and exemplary full-length donor templates encoding deletions such as c. −114 to −102 are also presented below (SEQ ID NOS: 904-909). Donor templates used herein may be non-specific templates that are non-homologous to regions of DNA within or near the target sequence. In certain embodiments, donor templates for use in targeting the 13 nt target region may include, without limitation, non-target specific templates that are nonhomologous to regions of DNA within or near the 13 nt target region. For example, a non-specific donor template for use in targeting the 13 nt target region may be non-homologous to the regions of DNA within or near the 13 nt target region and may comprise a donor template encoding the deletion of HBG1 c.−225 to −222 (corresponding to nucleotides 2716-2719 of SEQ ID NO:902). In certain embodiments, donor templates for use in targeting the GATA1 binding motif in BCL11Ae may include, without limitation, non-target specific templates that are nonhomologous to regions of DNA within or near GATA1 binding motif in BCL11Ae target sequence. Other donor templates for use in targeting BCL11Ae may include, without limitation, donor templates including alternations (e.g., deletions) of BCL11Ae, including, without limitation, the GATA1 motif in BCL11Ae.

### RNA-Guided Helicases and Dead Guide RNAs to Increase Accessibility to Edit Target Region

[0117] Various embodiments of the present disclosure also generally relate to genome editing systems configured to alter the helical structure of a nucleic acid to enhance genome editing of a target region (e.g., the 13 nt target region, proximal HBG1/2 promoter target sequence, and/or the GATA1 binding motif in BCL11Ae) in the nucleic acid, and methods and compositions thereof. Many embodiments relate to the observation that positioning an event that alters the helical structure of DNA within or adjacent to target regions in nucleic acid may improve the activity of genome editing systems directed to such target regions. Without wishing to be bound by any theory, it is thought that alterations of helical structure (e.g., by unwinding) within or proximal to DNA target regions may induce or increase accessibility of a genome editing system to the target region, resulting in increased editing of the target regions by the genome editing system.

[0118] CRISPR nucleases evolved primarily to defend bacteria against viral pathogens, whose genomes are not naturally organized into chromatin. By contrast, when eukaryotic genomes are organized into nucleosomal units comprising genomic DNA segments coiled around histones. CRISPR nucleases from several bacterial families have been found to be inactive for editing eukaryotic DNA, suggesting the ability to edit nucleosome-bound DNA might differ across enzymes (Ran 2015). Biochemical evidence shows that S. pyogenes Cas9 can cleave DNA efficiently at nucleosome edges, but has reduced activity when the target site is positioned near the center of nucleosome dyad (Hinz 2016).

[0119] In many cell types, target sites of interest may be strongly bound by nucleosomes, or may only possess adjacent PAMs for enzymes that do not edit efficiently in the presence of nucleosomes. In this case, the problematic nucleosomes could be displaced first by using adjacent target sites that are closer to the nucleosome edge or are bound by an enzyme that is more effective at binding nucleosomal DNA. However, cleavage at these adjacent sites could be detrimental to the therapeutic strategy. Therefore, having a programmable enzyme that binds these adjacent sites but does not cleave can enable more efficient functional editing.

[0120] It will be evident to the skilled artisan that the simplified systems and methods described herein offer several advantages over competing approaches. For example, a related strategy using catalytically inactive (dead) enzymes targeting sites adjacent to the site where editing is desired has been described in the literature (Chen 2017). However, this strategy entails a potential safety issue: if the full-length gRNAs complexed with a catalytically inactive nuclease molecule dissociates and later reassociates with a catalytically active nuclease enzyme, the gRNAs could introduce undesirable off-target edits. In contrast, the systems and methods of the present disclosure eliminates this risk because it relies on the observation that a dead gRNA (dgRNA) (gRNAs with a targeting domain of 15 nucleotides or less) allow an RNA-guided nuclease to bind, but not cleave, its target cite. Thus, the dgRNAs provided herein will not support nuclease activity irrespective of their association with any particular RNA-guided nuclease molecule. By using these dead gRNAs, adjacent target sites can be used to aid in nucleosome displacement without the risk of guide RNA swapping between active and inactive enzyme.

[0121] Another related strategy utilizes recruitment of exogenous trans-acting factors to facilitate nucleosome displacement. However, the systems and methods of this disclosure are advantageous over this strategy because they do not require gRNA modifications beyond truncation of the targeting domain, do not require the recruitment of exogenous trans-acting factors, and do not require transcriptional activation to achieve increased rates of editing.

[0122] Additionally, the use of dead gRNAs in the genome editing systems of the present disclosure are advantageous because they are not expected to result in any new delivery/solubility or folding/manufacturing considerations relative to genome editing systems utilizing full-length gRNAs. However, a skilled artisan might expect to encounter such problems in genome editing systems that utilize a exogenous trans-acting factors, which may entail large fusion proteins and/or RNA insertions or fusions. Further, dead gRNA strategies are likely to be capable of implementation using existing manufacturing, delivery, and other commercial processes that have been designed for wild-type nuclease products with relatively few substantial changes.

[0123] A variety of approaches to the unwinding and alteration of nucleic acid are employed in the various embodiments of this disclosure. One approach comprises unwinding (or opening of) a chromatin segment within or proximal to a target region (e.g., the 13 nt target region, proximal HBG1/2 promoter target sequence, and/or the GATA1 binding motif in BCL11Ae) of a nucleic acid in a cell and generating a double stranded break (DSB) within the target region of the nucleic acid, wherein the DSB is repaired in a manner that alters the target region. Unwinding the chromatin segment using the methods provided herein may facilitate increased access of catalytically active RNPs (e.g., catalytically active RNA-guided nucleases and gRNAs) to the chromatin to allow for more efficient editing of the DNA. For example, these methods may be used to edit target regions in chromatin that are difficult for a ribonucleoprotein (e.g., RNA-guided nuclease complexed to gRNA) to access because the chromatin is occupied by nucleosomes, such as closed chromatin. In certain embodiments, the unwinding of the chromatin segment occurs via RNA-guided helicase activity. In certain embodiments, the unwinding step does not require recruiting an exogenous trans-acting factor to the chromatin segment. In certain embodiments, the step of unwinding the chromatin segment does not comprise forming a single or double-stranded break in the nucleic acid within the chromatin segment.

[0124] In certain embodiments of the approaches and methods described above, the alteration of DNA helical structure is achieved through the action of an “RNA-guided helicase,” which term is generally used to refer to a molecule, typically a peptide, that (a) interacts (e.g., complexes) with a gRNA, and (b) together with the gRNA, associates with and unwinds, but does not cleave, a target site. RNA-guided helicases may, in certain embodiments, comprise RNA-guided nucleases configured to lack nuclease activity. However, the inventors have observed that even a cleavage-competent RNA-guided nuclease may be adapted for use as an RNA-guided helicase by complexing it to a dead gRNA having a truncated targeting domain of 15 or fewer nucleotides in length. Complexes of wild-type RNA-guided nucleases with dead gRNAs (dgRNAs) exhibit reduced or eliminated RNA-cleavage activity, but appear to retain helicase activity. RNA-guided helicases and dead gRNAs are described in greater detail below.

[0125] Regarding RNA-guided helicases, according to the present disclosure an RNA-guided helicase may comprise any of the RNA-guided nucleases disclosed herein and infra under the heading entitled “RNA-guided nucleases,” including, without limitation, a Cas9 or Cpf1 RNA-guided nuclease. The helicase activity of these RNA-guided nucleases allow for unwinding of DNA, providing increased access of genome editing system components (e.g., without limitation, catalytically active RNA-guided nuclease and gRNAs) to the desired target region to be edited (e.g., the 13 nt target region, proximal HBG1/2 promoter target sequence, and/or the GATA1 binding motif in BCL11Ae). In certain embodiments, the RNA-guided nuclease may be a catalytically active RNA-guided nuclease with nuclease activity. In certain embodiments, the RNA-guided helicase may be configured to lack nuclease activity. For example, in certain embodiments, the RNA-guided helicase may be a catalytically inactive RNA-guided nuclease that lacks nuclease activity, such as a catalytically dead Cas9 molecule, which still provides helicase activity. In certain embodiments, an RNA-guided helicase may form a complex with a dead gRNA, forming a dead RNP that cannot cleave nucleic acid. In other embodiments, the RNA-guided helicase may be a catalytically active RNA-guided nuclease complexed to a dead gRNA, forming a dead RNP that cannot cleave nucleic acid.

[0126] Turning to dead gRNAs, these include any of the dead gRNAs discussed herein and infra under the heading entitled “Dead gRNA molecules.” Dead gRNAs may be generated by truncating the 5′ end of a gRNA targeting domain sequence, resulting in a targeting domain sequence of 15 nucleotides or fewer in length. Dead gRNA molecules may comprise targeting domains complementary to regions proximal to or within a target region (e.g., the 13 nt target region, proximal HBG1/2 promoter target sequence, and/or the GATA1 binding motif in BCL11Ae) in a target nucleic acid. In certain embodiments, “proximal to” may denote the region within 10, 25, 50, 100, or 200 nucleotides of a target region (e.g., the 13 nt target region, proximal HBG1/2 promoter target sequence, and/or the GATA1 binding motif in BCL11Ae). In certain embodiments, dead gRNAs comprise targeting domains complementary to the transcription strand or non-transcription strand of DNA. In certain embodiments, the dead guide RNA is not configured to recruit an exogenous trans-acting factor to a target region (e.g., the 13 nt target region, proximal HBG1/2 promoter target sequence, and/or the GATA1 binding motif in BCL11Ae).

[0127] Also provided herein are methods of increasing a rate of indel formation in a target nucleic acid by unwinding DNA within or proximal to the target region (e.g., the 13 nt target region, proximal HBG1/2 promoter target sequence, and/or the GATA1 binding motif in BCL11Ae) using an RNA-guided helicase, generating a DSB within the target region, and forming an indel in the target region through repair of the DSB. The step of unwinding the DNA using an RNA-guided helicase provides for increased indel formation compared to a method of forming indels that does not use a helicase.

[0128] This disclosure further encompasses methods of deleting a segment of a target nucleic acid in a cell, comprising contacting the cell with an RNA-guided helicase and generating a double strand break (DSB) within the target region (e.g., the 13 nt target region, proximal HBG1/2 promoter target sequence, and/or the GATA1 binding motif in BCL11Ae). In certain embodiments, the RNA-guided helicase is configured to associate within or proximal to a target region of the target nucleic acid and unwind double stranded DNA (dsDNA) within or proximal to the target region. In certain embodiments, the target nucleic acid is a promoter region of a gene, a coding region of a gene, a non-coding region of a gene, an intron of a gene, or an exon of a gene. In certain embodiments, the segment of the target nucleic acid to be deleted may is at least about 15, 20, 25, 30, 35, 40, 45, 50, 55, 60, 65, 70, 75, or 100 base pairs in length. In certain embodiments, the DSB is repaired in a manner that deletes the segment of the target nucleic acid.

[0129] Genome editing systems configured to introduce alterations of helical structure may be implemented in a variety of ways, as is discussed below in detail. As an example, a genome editing system of this disclosure can be implemented as a ribonucleoprotein complex or a plurality of complexes in which multiple gRNAs are used. In certain embodiments, a ribonucleoprotein complex of the genome editing system may be an RNA-guided helicase complexed to a dead guide RNA. Ribonucleoprotein complexes can be introduced into a target cell using art-known methods, including electroporation, as described in Gori. Genome editing systems incorporating RNA-guided helicases may also be modified in any suitable manner, including without limitation by the inclusion of one or more of a DNA donor template that encodes a specific mutation (such as a deletion or insertion) in or near the target region, and/or an agent that enhances the efficiency with which such mutations are generated including, without limitation, a random oligonucleotide, a small molecule agonist or antagonist of a gene product involved in DNA repair or a DNA damage response, or a peptide agent. These modifications are described in greater detail below, under the heading “Genome Editing Strategies.” For clarity, this disclosure includes compositions comprising one or more gRNAs, dead gRNAs, RNA-guided helicases, RNA-guided nucleases, or a combination thereof.

[0130] While several of the exemplary embodiments above have focused on DNA unwinding, it should be noted that other helical alterations are within the scope of the present disclosure. These include, without limitation, overwinding, underwinding, increase or decrease of torsional strain on DNA strands within or proximate to a target region (e.g., through topoisomerase activity), denaturation or strand separation, and/or other suitable alterations resulting in modifications of chromatin structure. Each of these alterations may be catalyzed by an RNA-guided activity, or by the recruitment of an endogenous factor to a target region.

[0131] This overview has focused on a handful of exemplary embodiments that illustrate the principles of genome editing systems and CRISPR-mediated methods of altering cells. For clarity, however, this disclosure encompasses modifications and variations that have not been expressly addressed above, but will be evident to those of skill in the art. With that in mind, the following disclosure is intended to illustrate the operating principles of genome editing systems more generally. What follows should not be understood as limiting, but rather illustrative of certain principles of genome editing systems and CRISPR-mediated methods utilizing these systems, which, in combination with the instant disclosure, will inform those of skill in the art about additional implementations and modifications that are within its scope.

### Genome Editing Systems

[0132] The term “genome editing system” refers to any system having RNA-guided DNA editing activity. Genome editing systems of the present disclosure include at least two components adapted from naturally occurring CRISPR systems: a guide RNA (gRNA) and an RNA-guided nuclease. These two components form a complex that is capable of associating with a specific nucleic acid sequence and editing the DNA in or around that nucleic acid sequence, for instance by making one or more of a single-strand break (an SSB or nick), a double-strand break (a DSB) and/or a point mutation.

[0133] In certain embodiments, the genome editing systems in this disclosure may include a helicase for unwinding DNA. In certain embodiments, the helicase may be an RNA-guided helicase. In certain embodiments, the RNA-guided helicase may be an RNA-guided nuclease as described herein, such as a Cas9 or Cpf1 molecule. In certain embodiments, the RNA-guided nuclease is not configured to recruit an exogenous trans-acting factor to a target region. In certain embodiments, the RNA-guided nuclease may be configured to lack nuclease activity. In certain embodiments, the RNA-guided helicase may be complexed with a dead guide RNA as disclosed herein. For example, the dead guide RNA may comprise a targeting domain sequence less than 15 nucleotides in length. In certain embodiments, the dead guide RNA is not configured to recruit an exogenous trans-acting factor to a target region.

[0134] Naturally occurring CRISPR systems are organized evolutionarily into two classes and five types (Makarova 2011, incorporated by reference herein), and while genome editing systems of the present disclosure may adapt components of any type or class of naturally occurring CRISPR system, the embodiments presented herein are generally adapted from Class 2, and type II or V CRISPR systems. Class 2 systems, which encompass types II and V, are characterized by relatively large, multidomain RNA-guided nuclease proteins (e.g., Cas9 or Cpf1) and one or more guide RNAs (e.g., a crRNA and, optionally, a tracrRNA) that form ribonucleoprotein (RNP) complexes that associate with (i.e., target) and cleave specific loci complementary to a targeting (or spacer) sequence of the crRNA. Genome editing systems according to the present disclosure similarly target and edit cellular DNA sequences, but differ significantly from CRISPR systems occurring in nature. For example, the unimolecular guide RNAs described herein do not occur in nature, and both guide RNAs and RNA-guided nucleases according to this disclosure may incorporate any number of non-naturally occurring modifications.

[0135] Genome editing systems can be implemented (e.g., administered or delivered to a cell or a subject) in a variety of ways, and different implementations may be suitable for distinct applications. For instance, a genome editing system is implemented, in certain embodiments, as a protein/RNA complex (a ribonucleoprotein, or RNP), which can be included in a pharmaceutical composition that optionally includes a pharmaceutically acceptable carrier and/or an encapsulating agent, such as, without limitation, a lipid or polymer micro- or nano-particle, micelle, or liposome. In certain embodiments, a genome editing system is implemented as one or more nucleic acids encoding the RNA-guided nuclease and guide RNA components described above (optionally with one or more additional components); in certain embodiments, the genome editing system is implemented as one or more vectors comprising such nucleic acids, for instance a viral vector such as an adeno-associated virus (see section below under the heading “Implementation of genome editing systems: delivery, formulations, and routes of administration”); and in certain embodiments, the genome editing system is implemented as a combination of any of the foregoing. Additional or modified implementations that operate according to the principles set forth herein will be apparent to the skilled artisan and are within the scope of this disclosure.

[0136] It should be noted that the genome editing systems of the present disclosure can be targeted to a single specific nucleotide sequence, or may be targeted to and capable of editing in parallel two or more specific nucleotide sequences through the use of two or more guide RNAs. The use of multiple gRNAs is referred to as “multiplexing” throughout this disclosure, and can be employed to target multiple, unrelated target sequences of interest, or to form multiple SSBs or DSBs within a single target domain and, in some cases, to generate specific edits within such target domain. For example, International Patent Publication No. WO 2015/138510 by Maeder et al. (“Maeder”), which is incorporated by reference herein, describes a genome editing system for correcting a point mutation (C.2991+1655A to G) in the human CEP290 gene that results in the creation of a cryptic splice site, which in turn reduces or eliminates the function of the gene. The genome editing system of Maeder utilizes two guide RNAs targeted to sequences on either side of (i.e., flanking) the point mutation, and forms DSBs that flank the mutation. This, in turn, promotes deletion of the intervening sequence, including the mutation, thereby eliminating the cryptic splice site and restoring normal gene function.

[0137] As another example, WO 2016/073990 by Cotta-Ramusino et al. (“Cotta-Ramusino”), which is incorporated by reference herein, describes a genome editing system that utilizes two gRNAs in combination with a Cas9 nickase (a Cas9 that makes a single strand nick such as S. pyogenes D10A), an arrangement termed a “dual-nickase system.” The dual-nickase system of Cotta-Ramusino is configured to make two nicks on opposite strands of a sequence of interest that are offset by one or more nucleotides, which nicks combine to create a double strand break having an overhang (5′ in the case of Cotta-Ramusino, though 3′ overhangs are also possible). The overhang, in turn, can facilitate homology directed repair events in some circumstances. And, as another example, International Patent Publication No. WO 2015/070083 by Palestrant et al. (incorporated by reference herein) describes a gRNA targeted to a nucleotide sequence encoding Cas9 (referred to as a “governing RNA”), which can be included in a genome editing system comprising one or more additional gRNAs to permit transient expression of a Cas9 that might otherwise be constitutively expressed, for example in some virally transduced cells. These multiplexing applications are intended to be exemplary, rather than limiting, and the skilled artisan will appreciate that other applications of multiplexing are generally compatible with the genome editing systems described here.

[0138] As disclosed herein, in certain embodiments, genome editing systems may comprise multiple gRNAs that may be used to introduce mutations into the GATA1 binding motif in BCL11Ae or the 13 nt target region of HBG1 and/or HBG2. In certain embodiments, genome editing systems disclosed herein may comprise multiple gRNAs used to introduce mutations into the GATA1 binding motif in BCL11Ae and the 13 nt target region of HBG1 and/or HBG2.

[0139] Genome editing systems can, in some instances, form double strand breaks that are repaired by cellular DNA double-strand break mechanisms such as NHEJ or HDR. These mechanisms are described throughout the literature (see, e.g., Davis 2014 (describing Alt-HDR), Frit 2014 (describing Alt-NHEJ), and Iyama 2013 (describing canonical HDR and NHEJ pathways generally), all of which are incorporated by reference herein).

[0140] Where genome editing systems operate by forming DSBs, such systems optionally include one or more components that promote or facilitate a particular mode of double-strand break repair or a particular repair outcome. For instance, Cotta-Ramusino also describes genome editing systems in which a single stranded oligonucleotide “donor template” is added; the donor template is incorporated into a target region of cellular DNA that is cleaved by the genome editing system, and can result in a change in the target sequence.

[0141] In certain embodiments, genome editing systems modify a target sequence, or modify expression of a gene in or near the target sequence, without causing single- or double-strand breaks. For example, a genome editing system may include an RNA-guided nuclease fused to a functional domain that acts on DNA, thereby modifying the target sequence or its expression. As one example, an RNA-guided nuclease can be connected to (e.g., fused to) a cytidine deaminase functional domain, and may operate by generating targeted C-to-A substitutions. Exemplary nuclease/deaminase fusions are described in Komor 2016, which is incorporated by reference herein. Alternatively, a genome editing system may utilize a cleavage-inactivated (i.e., a “dead”) nuclease, such as a dead Cas9 (dCas9), and may operate by forming stable complexes on one or more targeted regions of cellular DNA, thereby interfering with functions involving the targeted region(s) including, without limitation, mRNA transcription, chromatin remodeling, etc.

Guide RNA (gRNA) Molecules

[0142] The terms “guide RNA” and “gRNA” refer to any nucleic acid that promotes the specific association (or “targeting”) of an RNA-guided nuclease such as a Cas9 or a Cpf1 to a target sequence such as a genomic or episomal sequence in a cell. gRNAs can be unimolecular (comprising a single RNA molecule, and referred to alternatively as chimeric), or modular (comprising more than one, and typically two, separate RNA molecules, such as a crRNA and a tracrRNA, which are usually associated with one another, for instance by duplexing). gRNAs and their component parts are described throughout the literature, for instance in Briner 2014, which is incorporated by reference), and in Cotta-Ramusino. Examples of modular and unimolecular gRNAs that may be used according to the embodiments herein include, without limitation, the sequences set forth in SEQ ID NOs:29-31 and 38-51. Examples of gRNA proximal and tail domains that may be used according to the embodiments herein include, without limitation, the sequences set forth in SEQ ID NOs:32-37.

[0143] In bacteria and archea, type II CRISPR systems generally comprise an RNA-guided nuclease protein such as Cas9, a CRISPR RNA (crRNA) that includes a 5′ region that is complementary to a foreign sequence, and a trans-activating crRNA (tracrRNA) that includes a 5′ region that is complementary to, and forms a duplex with, a 3′ region of the crRNA. While not intending to be bound by any theory, it is thought that this duplex facilitates the formation of—and is necessary for the activity of—the Cas9/gRNA complex. As type II CRISPR systems were adapted for use in gene editing, it was discovered that the crRNA and tracrRNA could be joined into a single unimolecular or chimeric guide RNA, in one non-limiting example, by means of a four nucleotide (e.g., GAAA) “tetraloop” or “linker” sequence bridging complementary regions of the crRNA (at its 3′ end) and the tracrRNA (at its 5′ end) (Mali 2013; Jiang 2013; Jinek 2012; all incorporated by reference herein).

[0144] Guide RNAs, whether unimolecular or modular, include a “targeting domain” that is fully or partially complementary to a target domain within a target sequence, such as a DNA sequence in the genome of a cell where editing is desired. Targeting domains are referred to by various names in the literature, including without limitation “guide sequences” (Hsu et al., Nat Biotechnol. 2013 September; 31(9): 827-832, (“Hsu”), incorporated by reference herein), “complementarity regions” (Cotta-Ramusino), “spacers” (Briner 2014) and generically as “crRNAs” (Jiang). Irrespective of the names they are given, targeting domains are typically 10-30 nucleotides in length, and in certain embodiments are 16-24 nucleotides in length (for instance, 16, 17, 18, 19, 20, 21, 22, 23 or 24 nucleotides in length), and are at or near the 5′ terminus of in the case of a Cas9 gRNA, and at or near the 3′ terminus in the case of a Cpf1 gRNA.

[0145] In addition to the targeting domains, gRNAs typically (but not necessarily, as discussed below) include a plurality of domains that may influence the formation or activity of gRNA/Cas9 complexes. For instance, as mentioned above, the duplexed structure formed by first and secondary complementarity domains of a gRNA (also referred to as a repeat:anti-repeat duplex) interacts with the recognition (REC) lobe of Cas9 and can mediate the formation of Cas9/gRNA complexes (Nishimasu et al., Cell 156, 935-949, Feb. 27, 2014 (“Nishimasu 2014”) and Nishimasu et al., Cell 162, 1113-1126, Aug. 27, 2015 (“Nishimasu 2015”), both incorporated by reference herein. It should be noted that the first and/or second complementarity domains may contain one or more poly-A tracts, which can be recognized by RNA polymerases as a termination signal. The sequence of the first and second complementarity domains are, therefore, optionally modified to eliminate these tracts and promote the complete in vitro transcription of gRNAs, for instance through the use of A-G swaps as described in Briner 2014, or A-U swaps. These and other similar modifications to the first and second complementarity domains are within the scope of the present disclosure.

[0146] Along with the first and second complementarity domains, Cas9 gRNAs typically include two or more additional duplexed regions that are involved in nuclease activity in vivo but not necessarily in vitro. (Nishimasu 2015). A first stem-loop one near the 3′ portion of the second complementarity domain is referred to variously as the “proximal domain,” (Cotta-Ramusino) “stem loop 1” (Nishimasu 2014 and 2015) and the “nexus” (Briner 2014). One or more additional stem loop structures are generally present near the 3′ end of the gRNA, with the number varying by species: S. pyogenes gRNAs typically include two 3′ stem loops (for a total of four stem loop structures including the repeat:anti-repeat duplex), while S. aureus and other species have only one (for a total of three stem loop structures). A description of conserved stem loop structures (and gRNA structures more generally) organized by species is provided in Briner 2014.

[0147] While the foregoing description has focused on gRNAs for use with Cas9, it should be appreciated that other RNA-guided nucleases exist which utilize gRNAs that differ in some ways from those described to this point. For instance, Cpf1 (“CRISPR from Prevotella and Franciscella 1”) is a recently discovered RNA-guided nuclease that does not require a tracrRNA to function (Zetsche 2015b, incorporated by reference herein). A gRNA for use in a Cpf1 genome editing system generally includes a targeting domain and a complementarity domain (alternately referred to as a “handle”). It should also be noted that, in gRNAs for use with Cpf1, the targeting domain is usually present at or near the 3′ end, rather than the 5′ end as described above in connection with Cas9 gRNAs (the handle is at or near the 5′ end of a Cpf1 gRNA).

[0148] Those of skill in the art will appreciate, however, that although structural differences may exist between gRNAs from different prokaryotic species, or between Cpf1 and Cas9 gRNAs, the principles by which gRNAs operate are generally consistent. Because of this consistency of operation, gRNAs can be defined, in broad terms, by their targeting domain sequences, and skilled artisans will appreciate that a given targeting domain sequence can be incorporated in any suitable gRNA, including a unimolecular or chimeric gRNA, or a gRNA that includes one or more chemical modifications and/or sequential modifications (substitutions, additional nucleotides, truncations, etc.). Thus, for economy of presentation in this disclosure, gRNAs may be described solely in terms of their targeting domain sequences.

[0149] More generally, skilled artisans will appreciate that some aspects of the present disclosure relate to systems, methods and compositions that can be implemented using multiple RNA-guided nucleases. For this reason, unless otherwise specified, the term gRNA should be understood to encompass any suitable gRNA that can be used with any RNA-guided nuclease, and not only those gRNAs that are compatible with a particular species of Cas9 or Cpf1. By way of illustration, the term gRNA can, in certain embodiments, include a gRNA for use with any RNA-guided nuclease occurring in a Class 2 CRISPR system, such as a type II or type V or CRISPR system, or an RNA-guided nuclease derived or adapted therefrom.

gRNA Design

[0150] Methods for selection and validation of target sequences as well as off-target analyses have been described previously (see, e.g., Mali 2013; Hsu 2013; Fu 2014; Heigwer 2014; Bae 2014; Xiao 2014; all incorporated by reference herein). As a non-limiting example, gRNA design may involve the use of a software tool to optimize the choice of potential target sequences corresponding to a user's target sequence, e.g., to minimize total off-target activity across the genome. While off-target activity is not limited to cleavage, the cleavage efficiency at each off-target sequence can be predicted, e.g., using an experimentally-derived weighting scheme. These and other guide selection methods are described in detail in Maeder and Cotta-Ramusino.

[0151] With respect to selection of gRNA targeting domain sequences directed to HBG1/2 target sites (e.g., the 13 nt target region), an in-silico gRNA target domain identification tool was utilized, and the hits were stratified into four tiers. For S. pyogenes, tier 1 targeting domains were selected based on (1) distance upstream or downstream from either end of the target site (i.e., HBG1/2 13 nt target region), specifically within 400 bp of either end of the target site, (2) a high level of orthogonality, and (3) the presence of 5′ G. Tier 2 targeting domains were selected based on (1) distance upstream or downstream from either end of the target site (i.e., HBG1/2 13 nt target region), specifically within 400 bp of either end of the target site, and (2) a high level of orthogonality. Tier 3 targeting domains were selected based on (1) distance upstream or downstream from either end of the target site (i.e., HBG1/2 13 nt target region), specifically within 400 bp of either end of the target site and (2) the presence of 5′ G. Tier 4 targeting domains were selected based on distance upstream or downstream from either end of the target site (i.e., HBG1/2 13 nt target region), specifically within 400 bp of either end of the target site.

[0152] For S. aureus, tier 1 targeting domains were selected based on (1) distance upstream or downstream from either end of the target site (i.e., HBG1/2 13 nt target region), specifically within 400 bp of either end of the target site, (2) a high level of orthogonality, (3) the presence of 5′ G, and (4) PAM having the sequence NNGRRT (SEQ ID NO:204). Tier 2 targeting domains were selected based on (1) distance upstream or downstream from either end of the target site (i.e., HBG1/2 13 nt target), specifically within 400 bp of either end of the target site, (2) a high level of orthogonality, and (3) PAM having the sequence NNGRRT (SEQ ID NO:204). Tier 3 targeting domains were selected based on (1) distance upstream or downstream from either end of the target site (i.e., HBG1/2 13 nt target region), specifically within 400 bp of either end of the target site, and (2) PAM having the sequence NNGRRT (SEQ ID NO:204). Tier 4 targeting domains were selected based on (1) distance upstream or downstream from either end of the target site (i.e., HBG1/2 13 nt target), specifically within 400 bp of either end of the target site, and (2) PAM having the sequence NNGRRV (SEQ ID NO:205).

[0153] Table 2, below, presents targeting domains for S. pyogenes and S. aureus gRNAs, broken out by (a) tier (1, 2, 3 or 4) and (b) HBG1 or HBG2.

TABLE 2
gRNA targeting domain sequences for HBG1/2 target sites

| | | HBG1 | HBG2 |
|---|---|---|---|
| S. | Tier 1 | 251-256 | 760-764 |
| pyogenes | Tier 2 | 257-274 | 765-781 |
| | Tier 3 | 275-300 | 275-281, 283-300 |
| | Tier 4 | 301-366 | 301-311, 313-342, 344- |
| | | | 348, 350-366, 782, 783 |
| S. | Tier 1 | 367-376 | 784-791 |
| aureus | Tier 2 | 343, 377-393 | 778, 792-803 |
| | Tier 3 | 357, 365, 394-461 | 357, 365, 394-461 |
| | Tier 4 | 252-254, 256, 268, | 292, 295, 347, 348, 353, |
| | | 272-274, 292, 295, | 360-362, 366, 462-468 476- |
| | | 347, 348, 353, 360- | 481, 489-587, 601-607, 614- |
| | | 362, 366, 598-759 | 620, 640-666, 674-679, 687- |
| | | | 693, 708-714, 733-753, 762- |
| | | | 764, 775, 779-781, 804-901 |

[0154] gRNAs may be designed to target the erythroid specific enhancer of BCL11A (BCL11Ae) to disrupt expression of a transcriptional repressor, BCL11A (Friedland). gRNAs were designed to target the GATA1 binding motif that is in the erythroid specific enhancer of BCL11A that is in the +58 DHS region of intron 2 (i.e., the GATA1 binding motif in BCL11Ae), where the +58 DHS enhancer region comprises the sequence set forth in SEQ ID NO:968. Targeting domain sequences of gRNAs that were designed to target disruption of the GATA1 binding motif in BCL11Ae, include, but are not limited to, the sequences set forth in SEQ ID NOs:952-955.

gRNA Modifications

[0155] The activity, stability, or other characteristics of gRNAs can be altered through the incorporation of certain modifications. As one example, transiently expressed or delivered nucleic acids can be prone to degradation by, e.g., cellular nucleases. Accordingly, the gRNAs described herein can contain one or more modified nucleosides or nucleotides which introduce stability toward nucleases. While not wishing to be bound by theory it is also believed that certain modified gRNAs described herein can exhibit a reduced innate immune response when introduced into cells. Those of skill in the art will be aware of certain cellular responses commonly observed in cells, e.g., mammalian cells, in response to exogenous nucleic acids, particularly those of viral or bacterial origin. Such responses, which can include induction of cytokine expression and release and cell death, may be reduced or eliminated altogether by the modifications presented herein.

[0156] Certain exemplary modifications discussed in this section can be included at any position within a gRNA sequence including, without limitation at or near the 5′ end (e.g., within 1-10, 1-5, or 1-2 nucleotides of the 5′ end) and/or at or near the 3′ end (e.g., within 1-10, 1-5, or 1-2 nucleotides of the 3′ end). In some cases, modifications are positioned within functional motifs, such as the repeat-anti-repeat duplex of a Cas9 gRNA, a stem loop structure of a Cas9 or Cpf1 gRNA, and/or a targeting domain of a gRNA.

[0157] As one example, the 5′ end of a gRNA can include a eukaryotic mRNA cap structure or cap analog (e.g., a G(5′)ppp(5′)G cap analog, a m7G(5′)ppp(5′)G cap analog, or a 3′-O-Me-m7G(5′)ppp(5′)G anti reverse cap analog (ARCA)), as shown below:

[chemical structure]

The cap or cap analog can be included during either chemical synthesis or in vitro transcription of the gRNA.

[0158] Along similar lines, the 5′ end of the gRNA can lack a 5′ triphosphate group. For instance, in vitro transcribed gRNAs can be phosphatase-treated (e.g., using calf intestinal alkaline phosphatase) to remove a 5′ triphosphate group.

[0159] Another common modification involves the addition, at the 3′ end of a gRNA, of a plurality (e.g., 1-10, 10-20, or 25-200) of adenine (A) residues referred to as a polyA tract. The polyA tract can be added to a gRNA during chemical synthesis, following in vitro transcription using a polyadenosine polymerase (e.g., E. coli Poly(A)Polymerase), or in vivo by means of a polyadenylation sequence, as described in Maeder.

[0160] It should be noted that the modifications described herein can be combined in any suitable manner, e.g., a gRNA, whether transcribed in vivo from a DNA vector, or in vitro transcribed gRNA, can include either or both of a 5′ cap structure or cap analog and a 3′ polyA tract.

[0161] Guide RNAs can be modified at a 3′ terminal U ribose. For example, the two terminal hydroxyl groups of the U ribose can be oxidized to aldehyde groups and a concomitant opening of the ribose ring to afford a modified nucleoside as shown below:

[chemical structure]

wherein “U” can be an unmodified or modified uridine.

[0162] The 3′ terminal U ribose can be modified with a 2′3′ cyclic phosphate as shown below:

[chemical structure]

wherein “U” can be an unmodified or modified uridine.

[0163] Guide RNAs can contain 3′ nucleotides which can be stabilized against degradation, e.g., by incorporating one or more of the modified nucleotides described herein. In certain embodiments, uridines can be replaced with modified uridines, e.g., 5-(2-amino)propyl uridine, and 5-bromo uridine, or with any of the modified uridines described herein; adenosines and guanosines can be replaced with modified adenosines and guanosines, e.g., with modifications at the 8-position, e.g., 8-bromo guanosine, or with any of the modified adenosines or guanosines described herein.

[0164] In certain embodiments, sugar-modified ribonucleotides can be incorporated into the gRNA, e.g., wherein the 2′ OH-group is replaced by a group selected from H, —OR, —R (wherein R can be, e.g., alkyl, cycloalkyl, aryl, aralkyl, heteroaryl or sugar), halo, —SH, —SR (wherein R can be, e.g., alkyl, cycloalkyl, aryl, aralkyl, heteroaryl or sugar), amino (wherein amino can be, e.g., NH₂; alkylamino, dialkylamino, heterocyclyl, arylamino, diarylamino, heteroarylamino, diheteroarylamino, or amino acid); or cyano (—CN). In certain embodiments, the phosphate backbone can be modified as described herein, e.g., with a phosphorothioate (PhTx) group. In certain embodiments, one or more of the nucleotides of the gRNA can each independently be a modified or unmodified nucleotide including, but not limited to 2′-sugar modified, such as, 2′-O-methyl, 2′-O-methoxyethyl, or 2′-Fluoro modified including, e.g., 2′-F or 2′-O-methyl, adenosine (A), 2′-F or 2′-O-methyl, cytidine (C), 2′-F or 2′-O-methyl, uridine (U), 2′-F or 2′-O-methyl, thymidine (T), 2′-F or 2′-O-methyl, guanosine (G), 2′-O-methoxyethyl-5-methyluridine (Teo), 2′-O-methoxyethyladenosine (Aeo), 2′-O-methoxyethyl-5-methylcytidine (m5Ceo), and any combinations thereof.

[0165] In certain embodiments, gRNAs as used herein may be modified or unmodified gRNAs. In certain embodiments, a gRNA may include one or more phosphorothioate modifications. In certain embodiments, the one or more phosphorothioate modifications may be at the 5′ end, 3′ end, or a combination thereof. In certain embodiments, a gRNA may include one or more 2-o-methyl modifications. In certain embodiments, the one or more 2-o-methyl modifications may be at the 5′ end, 3′ end, or a combination thereof. In certain embodiments, a gRNA may include one or more 2-o-methyl modifications, one or more phosphorothioate modifications, or a combination thereof. In certain embodiments, a gRNA comprising a targeting domain set forth in Table 12 may comprise one or more 2-o-methyl modifications, one or more phosphorothioate modifications, or a combination thereof. In certain embodiments, a gRNA modification may comprise one or more phosphorodithioate (PS2) linkage modifications.

[0166] Guide RNAs can also include “locked” nucleic acids (LNA) in which the 2′ OH-group can be connected, e.g., by a C1-6 alkylene or C1-6 heteroalkylene bridge, to the 4′ carbon of the same ribose sugar. Any suitable moiety can be used to provide such bridges, include without limitation methylene, propylene, ether, or amino bridges; O-amino (wherein amino can be, e.g., NH₂; alkylamino, dialkylamino, heterocyclyl, arylamino, diarylamino, heteroarylamino, or diheteroarylamino, ethylenediamine, or polyamino) and aminoalkoxy or O(CH₂)ₙ-amino (wherein amino can be, e.g., NH₂; alkylamino, dialkylamino, heterocyclyl, arylamino, diarylamino, heteroarylamino, or diheteroarylamino, ethylenediamine, or polyamino).

[0167] In certain embodiments, a gRNA can include a modified nucleotide which is multicyclic (e.g., tricyclo; and “unlocked” forms, such as glycol nucleic acid (GNA) (e.g., R-GNA or S-GNA, where ribose is replaced by glycol units attached to phosphodiester bonds), or threose nucleic acid (TNA, where ribose is replaced with α-L-threofuranosyl-(3′→2′)).

[0168] Generally, gRNAs include the sugar group ribose, which is a 5-membered ring having an oxygen. Exemplary modified gRNAs can include, without limitation, replacement of the oxygen in ribose (e.g., with sulfur (S), selenium (Se), or alkylene, such as, e.g., methylene or ethylene); addition of a double bond (e.g., to replace ribose with cyclopentenyl or cyclohexenyl); ring contraction of ribose (e.g., to form a 4-membered ring of cyclobutane or oxetane); ring expansion of ribose (e.g., to form a 6- or 7-membered ring having an additional carbon or heteroatom, such as for example, anhydrohexitol, altritol, mannitol, cyclohexanyl, cyclohexenyl, and morpholino that also has a phosphoramidate backbone). Although the majority of sugar analog alterations are localized to the 2′ position, other sites are amenable to modification, including the 4′ position. In certain embodiments, a gRNA comprises a 4′-S, 4′-Se or a 4′-C-aminomethyl-2′-O-Me modification.

[0169] In certain embodiments, deaza nucleotides, e.g., 7-deaza-adenosine, can be incorporated into the gRNA. In certain embodiments, O- and N-alkylated nucleotides, e.g., N6-methyl adenosine, can be incorporated into the gRNA. In certain embodiments, one or more or all of the nucleotides in a gRNA are deoxynucleotides.

Dead gRNA Molecules

[0170] Dead guide RNA (dgRNA) molecules according to the present disclosure include, but are not limited to, dead guide RNA molecules that are configured such that they do not provide an RNA guided-nuclease cleavage event. For example, dead guide RNA molecules may comprise a targeting domain comprising 15 nucleotides or fewer in length. Dead guide RNAs may be generated by removing the 5′ end of a gRNA sequence, which results in a truncated targeting domain sequence. For example, if a gRNA sequence, configured to provide a cleavage event, has a targeting domain sequence that is 20 nucleotides in length, a dead guide RNA may be created by removing 5 nucleotides from the 5′ end of the gRNA sequence. In certain embodiments, the dgRNA may be configured to bind (or associate with) a nucleic acid sequence within or proximal to a target region (e.g., the 13 nt target region, proximal HBG1/2 promoter target sequence, and/or the GATA1 binding motif in BCL11Ae) to be edited. For example, any of the dgRNAs set forth in Table 10 may be employed to bind a nucleic acid sequence proximal to the 13 nt target region. In certain embodiments, proximal to may denote the region within 10, 25, 50, 100, or 200 nucleotides of a target region (e.g., the 13 nt target region, proximal HBG1/2 promoter target sequence, and/or the GATA1 binding motif in BCL11Ae). In certain embodiments, the dead guide RNA is not configured to recruit an exogenous trans-acting factor to a target region. In certain embodiments, the dgRNA is configured such that it does not provide a DNA cleavage event when complexed with an RNA-guided nuclease. Skilled artisans will appreciate that dead guide RNA molecules may be designed to comprise targeting domains complementary to regions proximal to or within a target region in a target nucleic acid. In certain embodiments, dead guide RNAs comprise targeting domain sequences that are complementary to the transcription strand or non-transcription strand of double stranded DNA. The dgRNAs herein may include modifications at the 5′ and 3′ end of the dgRNA as described for guide RNAs in the section “gRNA modifications” herein. For example, in certain embodiments, dead guide RNAs may include an anti-reverse cap analog (ARCA) at the 5′ end of the RNA. In certain embodiments, dgRNAs may include a polyA tail at the 3′ end.

### RNA-Guided Nucleases

[0171] RNA-guided nucleases according to the present disclosure include, but are not limited to, naturally-occurring Class 2 CRISPR nucleases such as Cas9, and Cpf1, as well as other nucleases derived or obtained therefrom. In functional terms, RNA-guided nucleases are defined as those nucleases that: (a) interact with (e.g., complex with) a gRNA; and (b) together with the gRNA, associate with, and optionally cleave or modify, a target region of a DNA that includes (i) a sequence complementary to the targeting domain of the gRNA and, optionally, (ii) an additional sequence referred to as a “protospacer adjacent motif,” or “PAM,” which is described in greater detail below. As the following examples will illustrate, RNA-guided nucleases can be defined, in broad terms, by their PAM specificity and cleavage activity, even though variations may exist between individual RNA-guided nucleases that share the same PAM specificity or cleavage activity. Skilled artisans will appreciate that some aspects of the present disclosure relate to systems, methods and compositions that can be implemented using any suitable RNA-guided nuclease having a certain PAM specificity and/or cleavage activity. For this reason, unless otherwise specified, the term RNA-guided nuclease should be understood as a generic term, and not limited to any particular type (e.g., Cas9 vs. Cpf1), species (e.g., S. pyogenes vs. S. aureus) or variation (e.g., full-length vs. truncated or split; naturally-occurring PAM specificity vs. engineered PAM specificity, etc.) of RNA-guided nuclease.

[0172] Various RNA-guided nucleases may require different sequential relationships between PAMs and protospacers. In general, Cas9s recognize PAM sequences that are 3′ of the protospacer.

[0173] Cpf1, on the other hand, generally recognizes PAM sequences that are 5′ of the protospacer.

[0174] In addition to recognizing specific sequential orientations of PAMs and protospacers, RNA-guided nucleases can also recognize specific PAM sequences. S. aureus Cas9, for instance, recognizes a PAM sequence of NNGRRT or NNGRRV. S. pyogenes Cas9 recognizes NGG PAM sequences. And F. novicida Cpf1 recognizes a TTN PAM sequence. PAM sequences have been identified for a variety of RNA-guided nucleases, and a strategy for identifying novel PAM sequences has been described by Shmakov 2015. It should also be noted that engineered RNA-guided nucleases can have PAM specificities that differ from the PAM specificities of reference molecules (for instance, in the case of an engineered RNA-guided nuclease, the reference molecule may be the naturally occurring variant from which the RNA-guided nuclease is derived, or the naturally occurring variant having the greatest amino acid sequence homology to the engineered RNA-guided nuclease). Examples of PAMs that may be used according to the embodiments herein include, without limitation, the sequences set forth in SEQ ID NOs:199-205.

[0175] In addition to their PAM specificity, RNA-guided nucleases can be characterized by their DNA cleavage activity: naturally-occurring RNA-guided nucleases typically form DSBs in target nucleic acids, but engineered variants have been produced that generate only SSBs (discussed above; see also Ran 2013, incorporated by reference herein), or that do not cut at all.

### Cas9

[0176] Crystal structures have been determined for S. pyogenes Cas9 (Jinek 2014), and for S. aureus Cas9 in complex with a unimolecular guide RNA and a target DNA (Nishimasu 2014; Anders 2014; and Nishimasu 2015).

[0177] A naturally occurring Cas9 protein comprises two lobes: a recognition (REC) lobe and a nuclease (NUC) lobe; each of which comprise particular structural and/or functional domains. The REC lobe comprises an arginine-rich bridge helix (BH) domain, and at least one REC domain (e.g., a REC1 domain and, optionally, a REC2 domain). The REC lobe does not share structural similarity with other known proteins, indicating that it is a unique functional domain. While not wishing to be bound by any theory, mutational analyses suggest specific functional roles for the BH and REC domains: the BH domain appears to play a role in gRNA:DNA recognition, while the REC domain is thought to interact with the repeat:anti-repeat duplex of the gRNA and to mediate the formation of the Cas9/gRNA complex.

[0178] The NUC lobe comprises a RuvC domain, an HNH domain, and a PAM-interacting (PI) domain. The RuvC domain shares structural similarity to retroviral integrase superfamily members and cleaves the non-complementary (i.e., bottom) strand of the target nucleic acid. It may be formed from two or more split RuvC motifs (such as RuvC I, RuvCII, and RuvCIII in S. pyogenes and S. aureus). The HNH domain, meanwhile, is structurally similar to HNN endonuclease motifs, and cleaves the complementary (i.e., top) strand of the target nucleic acid. The PI domain, as its name suggests, contributes to PAM specificity. Examples of polypeptide sequences encoding Cas9 RuvC-like and Cas9 HNH-like domains that may be used according to the embodiments herein are set forth in SEQ ID NOs:15-23, 52-123 (RuvC-like domains) and SEQ ID NOs:24-28, 124-198 (HNH-like domains).

[0179] While certain functions of Cas9 are linked to (but not necessarily fully determined by) the specific domains set forth above, these and other functions may be mediated or influenced by other Cas9 domains, or by multiple domains on either lobe. For instance, in S. pyogenes Cas9, as described in Nishimasu 2014, the repeat:antirepeat duplex of the gRNA falls into a groove between the REC and NUC lobes, and nucleotides in the duplex interact with amino acids in the BH, PI, and REC domains. Some nucleotides in the first stem loop structure also interact with amino acids in multiple domains (PI, BH and REC1), as do some nucleotides in the second and third stem loops (RuvC and PI domains). Examples of polypeptide sequences encoding Cas9 molecules that may be used according to the embodiments herein are set forth in SEQ ID NOs:1-2, 4-6, 12, 14.

### Cpf1

[0180] The crystal structure of Acidaminococcus sp. Cpf1 in complex with crRNA and a double-stranded (ds) DNA target including a TTTN PAM sequence has been solved (Yamano 2016, incorporated by reference herein). Cpf1, like Cas9, has two lobes: a REC (recognition) lobe, and a NUC (nuclease) lobe. The REC lobe includes REC1 and REC2 domains, which lack similarity to any known protein structures. The NUC lobe, meanwhile, includes three RuvC domains (RuvC-I, -II and -III) and a BH domain. However, in contrast to Cas9, the Cpf1 REC lobe lacks an HNH domain, and includes other domains that also lack similarity to known protein structures: a structurally unique PI domain, three Wedge (WED) domains (WED-I, -II and -III), and a nuclease (Nuc) domain.

[0181] While Cas9 and Cpf1 share similarities in structure and function, it should be appreciated that certain Cpf1 activities are mediated by structural domains that are not analogous to any Cas9 domains. For instance, cleavage of the complementary strand of the target DNA appears to be mediated by the Nuc domain, which differs sequentially and spatially from the HNH domain of Cas9. Additionally, the non-targeting portion of Cpf1 gRNA (the handle) adopts a pseudoknot structure, rather than a stem loop structure formed by the repeat:antirepeat duplex in Cas9 gRNAs.

### Modifications of RNA-Guided Nucleases

[0182] The RNA-guided nucleases described above have activities and properties that can be useful in a variety of applications, but the skilled artisan will appreciate that RNA-guided nucleases can also be modified in certain instances, to alter cleavage activity, PAM specificity, or other structural or functional features.

[0183] Turning first to modifications that alter cleavage activity, mutations that reduce or eliminate the activity of domains within the NUC lobe have been described above. Exemplary mutations that may be made in the RuvC domains, in the Cas9 HNH domain, or in the Cpf1 Nuc domain are described in Ran 2013 and Yamano 2016, as well as in Cotta-Ramusino. In general, mutations that reduce or eliminate activity in one of the two nuclease domains result in RNA-guided nucleases with nickase activity, but it should be noted that the type of nickase activity varies depending on which domain is inactivated. As one example, inactivation of a RuvC domain of a Cas9 will result in a nickase that cleaves the complementary or top strand as shown below (where C denotes the site of cleavage).

[0184] On the other hand, inactivation of a Cas9 HNH domain results in a nickase that cleaves the bottom or non-complementary strand.

[0185] Modifications of PAM specificity relative to naturally occurring Cas9 reference molecules has been described for both S. pyogenes (Kleinstiver 2015a) and S. aureus (Kleinstiver 2015b). Modifications that improve the targeting fidelity of Cas9 have also been described (Kleinstiver 2016). Each of these references is incorporated by reference herein.

[0186] RNA-guided nucleases have been split into two or more parts (see, e.g., Zetsche 2015a; Fine 2015; both incorporated by reference).

[0187] RNA-guided nucleases can be, in certain embodiments, size-optimized or truncated, for instance via one or more deletions that reduce the size of the nuclease while still retaining gRNA association, target and PAM recognition, and cleavage activities. In certain embodiments, RNA guided nucleases are bound, covalently or non-covalently, to another polypeptide, nucleotide, or other structure, optionally by means of a linker. Exemplary bound nucleases and linkers are described by Guilinger 2014, which is incorporated by reference herein.

[0188] RNA-guided nucleases also optionally include a tag, such as, but not limited to, a nuclear localization signal to facilitate movement of RNA-guided nuclease protein into the nucleus. In certain embodiments, the RNA-guided nuclease can incorporate C- and/or N-terminal nuclear localization signals. Nuclear localization sequences are known in the art and are described in Maeder and elsewhere.

[0189] The foregoing list of modifications is intended to be exemplary in nature, and the skilled artisan will appreciate, in view of the instant disclosure, that other modifications may be possible or desirable in certain applications. For brevity, therefore, exemplary systems, methods and compositions of the present disclosure are presented with reference to particular RNA-guided nucleases, but it should be understood that the RNA-guided nucleases used may be modified in ways that do not alter their operating principles. Such modifications are within the scope of the present disclosure.

### RNA-Guided Helicases

[0190] RNA-guided helicases according to the present disclosure include, but are not limited to, naturally-occurring RNA-guided helicases that are capable of unwinding nucleic acid. As discussed supra, catalytically active RNA-guided nucleases cleave or modify a target region of DNA. It has also been shown that certain RNA-guided nucleases, such as Cas9, also have helicase activity that enables them to unwind nucleic acid. In certain embodiments, the RNA-guided helicases according to the present disclosure may be any of the RNA-nucleases described herein and supra in the section entitled “RNA-guided nucleases.” In certain embodiments, the RNA-guided nuclease is not configured to recruit an exogenous trans-acting factor to a target region. In certain embodiments, an RNA-guided helicase may be an RNA-guided nuclease configured to lack nuclease activity. For example, in certain embodiments, an RNA-guided helicase may be a catalytically inactive RNA-guided nuclease that lacks nuclease activity, but still retains its helicase activity. In certain embodiments, an RNA-guided nuclease may be mutated to abolish its nuclease activity (e.g., dead Cas9), creating a catalytically inactive RNA-guided nuclease that is unable to cleave nucleic acid, but which can still unwind DNA. In certain embodiments, an RNA-guided helicase may be complexed with any of the dead guide RNAs as described herein. For example, a catalytically active RNA-guided helicase (e.g., Cas9 or Cpf1) may form an RNP complex with a dead guide RNA, resulting in a catalytically inactive dead RNP (dRNP). In certain embodiments, a catalytically inactive RNA-guided helicase (e.g., dead Cas9) and a dead guide RNA may form a dRNP. These dRNPs, although incapable of providing a cleavage event, still retain their helicase activity that is important for unwinding nucleic acid.

### Nucleic Acids Encoding RNA-Guided Nucleases

[0191] Nucleic acids encoding RNA-guided nucleases, e.g., Cas9, Cpf1 or functional fragments thereof, are provided herein. Examples of nucleic acid sequences encoding Cas9 molecules that may be used according to the embodiments herein are set forth in SEQ ID NOs:3, 7-11, 13. Exemplary nucleic acids encoding RNA-guided nucleases have been described previously (see, e.g., Cong 2013; Wang 2013; Mali 2013; Jinek 2012).

[0192] In some cases, a nucleic acid encoding an RNA-guided nuclease can be a synthetic nucleic acid sequence. For example, the synthetic nucleic acid molecule can be chemically modified. In certain embodiments, an mRNA encoding an RNA-guided nuclease will have one or more (e.g., all) of the following properties: it can be capped; polyadenylated; and substituted with 5-methylcytidine and/or pseudouridine.

[0193] Synthetic nucleic acid sequences can also be codon optimized, e.g., at least one non-common codon or less-common codon has been replaced by a common codon. For example, the synthetic nucleic acid can direct the synthesis of an optimized messenger mRNA, e.g., optimized for expression in a mammalian expression system, e.g., described herein. Examples of codon optimized Cas9 coding sequences are presented in Cotta-Ramusino.

[0194] In addition, or alternatively, a nucleic acid encoding an RNA-guided nuclease may comprise a nuclear localization sequence (NLS). Nuclear localization sequences are known in the art.

### Functional Analysis of Candidate Molecules

[0195] Candidate RNA-guided nucleases, gRNAs, and complexes thereof, can be evaluated by standard methods known in the art (see, e.g., Cotta-Ramusino). The stability of RNP complexes may be evaluated by differential scanning fluorimetry, as described below.

### Differential Scanning Fluorimetry (DSF)

[0196] The thermostability of ribonucleoprotein (RNP) complexes comprising gRNAs and RNA-guided nucleases can be measured via DSF. The DSF technique measures the thermostability of a protein, which can increase under favorable conditions such as the addition of a binding RNA molecule, e.g., a gRNA.

[0197] A DSF assay can be performed according to any suitable protocol, and can be employed in any suitable setting, including without limitation (a) testing different conditions (e.g., different stoichiometric ratios of gRNA: RNA-guided nuclease protein, different buffer solutions, etc.) to identify optimal conditions for RNP formation; and (b) testing modifications (e.g., chemical modifications, alterations of sequence, etc.) of an RNA-guided nuclease and/or a gRNA to identify those modifications that improve RNP formation or stability. One readout of a DSF assay is a shift in melting temperature of the RNP complex; a relatively high shift suggests that the RNP complex is more stable (and may thus have greater activity or more favorable kinetics of formation, kinetics of degradation, or another functional characteristic) relative to a reference RNP complex characterized by a lower shift. When the DSF assay is deployed as a screening tool, a threshold melting temperature shift may be specified, so that the output is one or more RNPs having a melting temperature shift at or above the threshold. For instance, the threshold can be 5-10° C. (e.g., 5°, 6°, 7° 8°, 9°, 10°) or more, and the output may be one or more RNPs characterized by a melting temperature shift greater than or equal to the threshold.

[0198] Two non-limiting examples of DSF assay conditions are set forth below:

[0199] To determine the best solution to form RNP complexes, a fixed concentration (e.g., 2 M) of Cas9 in water+10× SYPRO Orange® (Life Technologies cat #S-6650) is dispensed into a 384 well plate. An equimolar amount of gRNA diluted in solutions with varied pH and salt is then added. After incubating at room temperature for 10′ and brief centrifugation to remove any bubbles, a Bio-Rad CFX384™ Real-Time System C1000 Touch™ Thermal Cycler with the Bio-Rad CFX Manager software is used to run a gradient from 20° C. to 90° C. with a 1° C. increase in temperature every 10 seconds.

[0200] The second assay consists of mixing various concentrations of gRNA with fixed concentration (e.g., 2 M) Cas9 in optimal buffer from assay 1 above and incubating (e.g., at RT for 10′) in a 384 well plate. An equal volume of optimal buffer+10× SYPRO Orange® (Life Technologies cat #S-6650) is added and the plate sealed with Microseal® B adhesive (MSB-1001). Following brief centrifugation to remove any bubbles, a Bio-Rad CFX384™ Real-Time System C1000 Touch™ Thermal Cycler with the Bio-Rad CFX Manager software is used to run a gradient from 20° C. to 90° C. with a 1° C. increase in temperature every 10 seconds.

### Genome Editing Strategies

[0201] The genome editing systems described above are used, in various embodiments of the present disclosure, to generate edits in (i.e., to alter) targeted regions of DNA within or obtained from a cell. Various strategies are described herein to generate particular edits, and these strategies are generally described in terms of the desired repair outcome, the number and positioning of individual edits (e.g., SSBs or DSBs), and the target sites of such edits.

[0202] Genome editing strategies that involve the formation of SSBs or DSBs are characterized by repair outcomes including: (a) deletion of all or part of a targeted region; (b) insertion into or replacement of all or part of a targeted region; or (c) interruption of all or part of a targeted region. This grouping is not intended to be limiting, or to be binding to any particular theory or model, and is offered solely for economy of presentation. Skilled artisans will appreciate that the listed outcomes are not mutually exclusive and that some repairs may result in other outcomes. The description of a particular editing strategy or method should not be understood to require a particular repair outcome unless otherwise specified.

[0203] Replacement of a targeted region generally involves the replacement of all or part of the existing sequence within the targeted region with a homologous sequence, for instance through gene correction or gene conversion, two repair outcomes that are mediated by HDR pathways. HDR is promoted by the use of a donor template, which can be single-stranded or double stranded, as described in greater detail below. Single or double stranded templates can be exogenous, in which case they will promote gene correction, or they can be endogenous (e.g., a homologous sequence within the cellular genome), to promote gene conversion. Exogenous templates can have asymmetric overhangs (i.e., the portion of the template that is complementary to the site of the DSB may be offset in a 3′ or 5′ direction, rather than being centered within the donor template), for instance as described by Richardson 2016 (incorporated by reference herein). In instances where the template is single stranded, it can correspond to either the complementary (top) or non-complementary (bottom) strand of the targeted region.

[0204] Gene conversion and gene correction are facilitated, in some cases, by the formation of one or more nicks in or around the targeted region, as described in Ran and Cotta-Ramusino. In some cases, a dual-nickase strategy is used to form two offset SSBs that, in turn, form a single DSB having an overhang (e.g., a 5′ overhang).

[0205] Interruption and/or deletion of all or part of a targeted sequence can be achieved by a variety of repair outcomes. As one example, a sequence can be deleted by simultaneously generating two or more DSBs that flank a targeted region, which is then excised when the DSBs are repaired, as is described in Maeder for the LCA10 mutation. As another example, a sequence can be interrupted by a deletion generated by formation of a double strand break with single-stranded overhangs, followed by exonucleolytic processing of the overhangs prior to repair.

[0206] One specific subset of target sequence interruptions is mediated by the formation of an indel within the targeted sequence, where the repair outcome is typically mediated by NHEJ pathways (including Alt-NHEJ). NHEJ is referred to as an “error prone” repair pathway because of its association with indel mutations. In some cases, however, a DSB is repaired by NHEJ without alteration of the sequence around it (a so-called “perfect” or “scarless” repair); this generally requires the two ends of the DSB to be perfectly ligated. Indels, meanwhile, are thought to arise from enzymatic processing of free DNA ends before they are ligated that adds and/or removes nucleotides from either or both strands of either or both free ends.

[0207] Because the enzymatic processing of free DSB ends may be stochastic in nature, indel mutations tend to be variable, occurring along a distribution, and can be influenced by a variety of factors, including the specific target site, the cell type used, the genome editing strategy used, etc. Even so, it is possible to draw limited generalizations about indel formation: deletions formed by repair of a single DSB are most commonly in the 1-50 bp range, but can reach greater than 100-200 bp. Insertions formed by repair of a single DSB tend to be shorter and often include short duplications of the sequence immediately surrounding the break site. However, it is possible to obtain large insertions, and in these cases, the inserted sequence has often been traced to other regions of the genome or to plasmid DNA present in the cells.

[0208] Indel mutations—and genome editing systems configured to produce indels—are useful for interrupting target sequences, for example, when the generation of a specific final sequence is not required and/or where a frameshift mutation would be tolerated. They can also be useful in settings where particular sequences are preferred, insofar as the certain sequences desired tend to occur preferentially from the repair of an SSB or DSB at a given site. Indel mutations are also a useful tool for evaluating or screening the activity of particular genome editing systems and their components. In these and other settings, indels can be characterized by (a) their relative and absolute frequencies in the genomes of cells contacted with genome editing systems and (b) the distribution of numerical differences relative to the unedited sequence, e.g., ±1, ±2, ±3, etc. As one example, in a lead-finding setting, multiple gRNAs can be screened to identify those gRNAs that most efficiently drive cutting at a target site based on an indel readout under controlled conditions. Guides that produce indels at or above a threshold frequency, or that produce a particular distribution of indels, can be selected for further study and development. Indel frequency and distribution can also be useful as a readout for evaluating different genome editing system implementations or formulations and delivery methods, for instance by keeping the gRNA constant and varying certain other reaction conditions or delivery methods.

### Multiplex Strategies

[0209] Genome editing systems according to this disclosure may also be employed for multiplex gene editing to generate two or more DSBs, either in the same locus or in different loci. Any of the RNA-guided nucleases and gRNAs disclosed herein may be used in genome editing systems for multiplex gene editing. Strategies for editing that involve the formation of multiple DSBs, or SSBs, are described in, for instance, Cotta-Ramusino.

[0210] As disclosed herein, multiple gRNAs may be used in genome editing systems to introduce alterations (e.g., deletions, insertions) into the 13 nt target region of HBG1 and/or HBG2. In certain embodiments, one or more gRNAs comprising a targeting domain set forth in SEQ ID NOs:251-901, 940-942 may be used to introduce alterations in the 13 nt target region of HBG1 and/or HBG2. In other embodiments, multiple gRNAs may be used in genome editing systems to introduce alterations into the GATA1 binding motif in BCL11Ae. In certain embodiments, one or more gRNAs comprising a targeting domain set forth in SEQ ID NOs:952-955 may be used to introduce alterations in the GATA1 binding motif in BCL11Ae. Multiple gRNAs may also be used in genome editing systems to introduce alterations into the GATA1 binding motif in BCL11Ae and the 13 nt target region of HBG1 and/or HBG2. In certain embodiments, one or more gRNAs comprising a targeting domain set forth in SEQ ID NOs:952-955 may be used to introduce alterations in the GATA1 binding motif in BCL11Ae and one or more gRNAs comprising a targeting domain set forth in SEQ ID NOs:251-901, 940-942 may be used to introduce alterations in the 13 nt target region of HBG1 and/or HBG2.

### Donor Template Design

[0211] Donor template design is described in detail in the literature, for instance in Cotta-Ramusino. DNA oligomer donor templates (oligodeoxynucleotides or ODNs), which can be single stranded (ssODNs) or double-stranded (dsODNs), can be used to facilitate HDR-based repair of DSBs or to boost overall editing rate, and are particularly useful for introducing alterations into a target DNA sequence, inserting a new sequence into the target sequence, or replacing the target sequence altogether.

[0212] Whether single-stranded or double stranded, donor templates generally include regions that are homologous to regions of DNA within or near (e.g., flanking or adjoining) a target sequence to be cleaved. These homologous regions are referred to here as “homology arms,” and are illustrated schematically below:
[0213] [5′ homology arm]-[replacement sequence]-[3′ homology arm].

[0214] The homology arms can have any suitable length (including 0 nucleotides if only one homology arm is used), and 3′ and 5′ homology arms can have the same length, or can differ in length. The selection of appropriate homology arm lengths can be influenced by a variety of factors, such as the desire to avoid homologies or microhomologies with certain sequences such as Alu repeats or other very common elements. For example, a 5′ homology arm can be shortened to avoid a sequence repeat element. In other embodiments, a 3′ homology arm can be shortened to avoid a sequence repeat element. In some embodiments, both the 5′ and the 3′ homology arms can be shortened to avoid including certain sequence repeat elements. In addition, some homology arm designs can improve the efficiency of editing or increase the frequency of a desired repair outcome. For example, Richardson 2016, which is incorporated by reference herein, found that the relative asymmetry of 3′ and 5′ homology arms of single stranded donor templates influenced repair rates and/or outcomes.

[0215] Replacement sequences in donor templates have been described elsewhere, including in Cotta-Ramusino et al. A replacement sequence can be any suitable length (including zero nucleotides, where the desired repair outcome is a deletion), and typically includes one, two, three or more sequence modifications relative to the naturally-occurring sequence within a cell in which editing is desired. One common sequence modification involves the alteration of the naturally-occurring sequence to repair a mutation that is related to a disease or condition of which treatment is desired. Another common sequence modification involves the alteration of one or more sequences that are complementary to, or then, the PAM sequence of the RNA-guided nuclease or the targeting domain of the gRNA(s) being used to generate an SSB or DSB, to reduce or eliminate repeated cleavage of the target site after the replacement sequence has been incorporated into the target site.

[0216] Where a linear ssODN is used, it can be configured to (i) anneal to the nicked strand of the target nucleic acid, (ii) anneal to the intact strand of the target nucleic acid, (iii) anneal to the plus strand of the target nucleic acid, and/or (iv) anneal to the minus strand of the target nucleic acid. An ssODN may have any suitable length, e.g., about, at least, or no more than 100-150 or 150-200 nucleotides (e.g., 100, 110, 120, 130, 140, 150, 160, 170, 180, 190, or 200 nucleotides).

[0217] It should be noted that a template nucleic acid can also be a nucleic acid vector, such as a viral genome or circular double stranded DNA, e.g., a plasmid. Nucleic acid vectors comprising donor templates can include other coding or non-coding elements. For example, a template nucleic acid can be delivered as part of a viral genome (e.g., in an AAV or lentiviral genome) that includes certain genomic backbone elements (e.g., inverted terminal repeats, in the case of an AAV genome) and optionally includes additional sequences coding for a gRNA and/or an RNA-guided nuclease. In certain embodiments, the donor template can be adjacent to, or flanked by, target sites recognized by one or more gRNAs, to facilitate the formation of free DSBs on one or both ends of the donor template that can participate in repair of corresponding SSBs or DSBs formed in cellular DNA using the same gRNAs. Exemplary nucleic acid vectors suitable for use as donor templates are described in Cotta-Ramusino, which is incorporated by reference.

[0218] Whatever format is used, a template nucleic acid can be designed to avoid undesirable sequences. In certain embodiments, one or both homology arms can be shortened to avoid overlap with certain sequence repeat elements, e.g., Alu repeats, LINE elements, etc.

[0219] In certain embodiments, silent, non-pathogenic SNPs may be included in the ssODN donor template to allow for identification of a gene editing event.

[0220] In certain embodiments, a donor template may be a non-specific template that is non-homologous to regions of DNA within or near a target sequence to be cleaved. In certain embodiments, donor templates for use in targeting the GATA1 binding motif in BCL11Ae may include, without limitation, non-target specific templates that are nonhomologous to regions of DNA within or near the GATA1 binding motif in BCL11Ae. In certain embodiments, donor templates for use in targeting the 13 nt target region may include, without limitation, non-target specific templates that are nonhomologous to regions of DNA within or near the 13 nt target region.

### Target Cells

[0221] Genome editing systems according to this disclosure can be used to manipulate or alter a cell, e.g., to edit or alter a target nucleic acid. The manipulating can occur, in various embodiments, in vivo or ex vivo.

[0222] A variety of cell types can be manipulated or altered according to the embodiments of this disclosure, and in some cases, such as in vivo applications, a plurality of cell types are altered or manipulated, for example by delivering genome editing systems according to this disclosure to a plurality of cell types. In other cases, however, it may be desirable to limit manipulation or alteration to a particular cell type or types. For instance, it can be desirable in some instances to edit a cell with limited differentiation potential or a terminally differentiated cell, such as a photoreceptor cell in the case of Maeder, in which modification of a genotype is expected to result in a change in cell phenotype. In other cases, however, it may be desirable to edit a less differentiated, multipotent or pluripotent, stem or progenitor cell. By way of example, the cell may be an embryonic stem cell, induced pluripotent stem cell (iPSC), hematopoietic stem/progenitor cell (HSPC), or other stem or progenitor cell type that differentiates into a cell type of relevance to a given application or indication.

[0223] As a corollary, the cell being altered or manipulated is, variously, a dividing cell or a non-dividing cell, depending on the cell type(s) being targeted and/or the desired editing outcome.

[0224] When cells are manipulated or altered ex vivo, the cells can be used (e.g., administered to a subject) immediately, or they can be maintained or stored for later use. Those of skill in the art will appreciate that cells can be maintained in culture or stored (e.g., frozen in liquid nitrogen) using any suitable method known in the art.

### Implementation of Genome Editing Systems: Delivery, Formulations, and Routes of Administration

[0225] As discussed above, the genome editing systems of this disclosure can be implemented in any suitable manner, meaning that the components of such systems, including without limitation the RNA-guided nuclease, gRNA, and optional donor template nucleic acid, can be delivered, formulated, or administered in any suitable form or combination of forms that results in the transduction, expression or introduction of a genome editing system and/or causes a desired repair outcome in a cell, tissue or subject. Tables 3 and 4 set forth several, non-limiting examples of genome editing system implementations. Those of skill in the art will appreciate, however, that these listings are not comprehensive, and that other implementations are possible. With reference to Table 3 in particular, the table lists several exemplary implementations of a genome editing system comprising a single gRNA and an optional donor template. However, genome editing systems according to this disclosure can incorporate multiple gRNAs, multiple RNA-guided nucleases, and other components such as proteins, and a variety of implementations will be evident to the skilled artisan based on the principles illustrated in the table. In the table, [N/A] indicates that the genome editing system does not include the indicated component.

TABLE 3
Genome editing components

| RNA-guided | | Donor | |
|---|---|---|---|
| Nuclease | gRNA | Template | Comments |
| Protein | RNA | [N/A] | An RNA-guided nuclease protein |
| | | | complexed with a gRNA molecule |
| | | | (an RNP complex) |
| Protein | RNA | DNA | An RNP complex as described |
| | | | above plus a single-stranded or |
| | | | double stranded donor template. |
| Protein | DNA | [N/A] | An RNA-guided nuclease protein |
| | | | plus gRNA transcribed from DNA. |
| Protein | DNA | DNA | An RNA-guided nuclease protein |
| | | | plus gRNA-encoding DNA and a |
| | | | separate DNA donor template. |
| Protein | DNA | | An RNA-guided nuclease protein |
| | | | and a single DNA encoding both a |
| | | | gRNA and a donor template. |
| DNA | | | A DNA or DNA vector encoding |
| | | | an RNA-guided nuclease, a gRNA |
| | | | and a donor template. |
| DNA | DNA | [N/A] | Two separate DNAs, or two |
| | | | separate DNA vectors, encoding |
| | | | the RNA-guided nuclease and the |
| | | | gRNA, respectively. |
| DNA | DNA | DNA | Three separate DNAs, or three |
| | | | separate DNA vectors, encoding |
| | | | the RNA-guided nuclease, the |
| | | | gRNA and the donor template, |
| | | | respectively. |
| DNA | | [N/A] | A DNA or DNA vector encoding |
| | | | an RNA-guided nuclease and a |
| | | | gRNA |
| DNA | | DNA | A first DNA or DNA vector |
| | | | encoding an RNA-guided nuclease |
| | | | and a gRNA, and a second DNA or |
| | | | DNA vector encoding a donor |
| | | | template. |
| DNA | DNA | | A first DNA or DNA vector |
| | | | encoding an RNA-guided nuclease |
| | | | and second DNA or DNA vector |
| | | | encoding a gRNA and a donor |
| | | | template. |
| DNA | | | A first DNA or DNA vector |
| | DNA | | encoding an RNA-guided nuclease |
| | | | and a donor template, and a second |
| | | | DNA or DNA vector encoding a |
| | | | gRNA |
| DNA | | | A DNA or DNA vector encoding |
| | RNA | | an RNA-guided nuclease and a |
| | | | donor template, and a gRNA |

| RNA | [N/A] | An RNA or RNA vector encoding |
|---|---|---|
| | | an RNA-guided nuclease and |
| | | comprising a gRNA |
| RNA | DNA | An RNA or RNA vector encoding |

an RNA-guided nuclease and
comprising a gRNA, and a DNA or
DNA vector encoding a donor
template.

[0226] Table 4 summarizes various delivery methods for the components of genome editing systems, as described herein. Again, the listing is intended to be exemplary rather than limiting.

TABLE 4

| | | Delivery | | | |
|---|---|---|---|---|---|
| | | into Non- | | | Type of |
| | | Dividing | Duration of | Genome | Molecule |
| Delivery Vector/Mode | | Cells | Expression | Integration | Delivered |
| Physical (e.g., electroporation, | | YES | Transient | NO | Nucleic Acids |
| particle gun, Calcium Phosphate | | | | | and Proteins |
| transfection, cell compression | | | | | |
| or squeezing) | | | | | |
| Viral | Retrovirus | NO | Stable | YES | RNA |
| | Lentivirus | YES | Stable | YES/NO with | RNA |
| | | | | modifications | |
| | Adenovirus | YES | Transient | NO | DNA |
| | Adeno- | YES | Stable | NO | DNA |
| | Associated | | | | |
| | Virus (AAV) | | | | |
| | Vaccinia Virus | YES | Very | NO | DNA |
| | | | Transient | | |
| | Herpes Simplex | YES | Stable | NO | DNA |
| | Virus | | | | |
| Non-Viral | Cationic | YES | Transient | Depends on | Nucleic Acids |
| | Liposomes | | | what is | and Proteins |
| | | | | delivered | |
| | Polymeric | YES | Transient | Depends on | Nucleic Acids |
| | Nanoparticles | | | what is | and Proteins |
| | | | | delivered | |
| Biological | Attenuated | YES | Transient | NO | Nucleic Acids |
| Non-Viral | Bacteria | | | | |
| Delivery | Engineered | YES | Transient | NO | Nucleic Acids |
| Vehicles | Bacteriophages | | | | |
| | Mammalian | YES | Transient | NO | Nucleic Acids |
| | Virus-like | | | | |
| | Particles | | | | |
| | Biological | YES | Transient | NO | Nucleic Acids |
| | liposomes: | | | | |
| | Erythrocyte | | | | |
| | Ghosts and | | | | |
| | Exosomes | | | | |

### Nucleic Acid-Based Delivery of Genome Editing Systems

[0227] Nucleic acids encoding the various elements of a genome editing system according to the present disclosure can be administered to subjects or delivered into cells by art-known methods or as described herein. For example, RNA-guided nuclease-encoding and/or gRNA-encoding DNA, as well as donor template nucleic acids can be delivered by, e.g., vectors (e.g., viral or non-viral vectors), non-vector based methods (e.g., using naked DNA or DNA complexes), or a combination thereof.

[0228] Nucleic acids encoding genome editing systems or components thereof can be delivered directly to cells as naked DNA or RNA, for instance by means of transfection or electroporation, or can be conjugated to molecules (e.g., N-acetylgalactosamine) promoting uptake by the target cells (e.g., erythrocytes, HSCs). Nucleic acid vectors, such as the vectors summarized in Table 4, can also be used.

[0229] Nucleic acid vectors can comprise one or more sequences encoding genome editing system components, such as an RNA-guided nuclease, a gRNA and/or a donor template. A vector can also comprise a sequence encoding a signal peptide (e.g., for nuclear localization, nucleolar localization, or mitochondrial localization), associated with (e.g., inserted into or fused to) a sequence coding for a protein. As one example, a nucleic acid vectors can include a Cas9 coding sequence that includes one or more nuclear localization sequences (e.g., a nuclear localization sequence from SV40).

[0230] The nucleic acid vector can also include any suitable number of regulatory/control elements, e.g., promoters, enhancers, introns, polyadenylation signals, Kozak consensus sequences, or internal ribosome entry sites (IRES). These elements are well known in the art, and are described in Cotta-Ramusino.

[0231] Nucleic acid vectors according to this disclosure include recombinant viral vectors. Exemplary viral vectors are set forth in Table 4, and additional suitable viral vectors and their use and production are described in Cotta-Ramusino. Other viral vectors known in the art can also be used. In addition, viral particles can be used to deliver genome editing system components in nucleic acid and/or peptide form. For example, “empty” viral particles can be assembled to contain any suitable cargo. Viral vectors and viral particles can also be engineered to incorporate targeting ligands to alter target tissue specificity.

[0232] In addition to viral vectors, non-viral vectors can be used to deliver nucleic acids encoding genome editing systems according to the present disclosure. One important category of non-viral nucleic acid vectors are nanoparticles, which can be organic or inorganic. Nanoparticles are well known in the art, and are summarized in Cotta-Ramusino. Any suitable nanoparticle design can be used to deliver genome editing system components or nucleic acids encoding such components. For instance, organic (e.g., lipid and/or polymer) nanoparticles can be suitable for use as delivery vehicles in certain embodiments of this disclosure. Exemplary lipids for use in nanoparticle formulations, and/or gene transfer are shown in Table 5, and Table 6 lists exemplary polymers for use in gene transfer and/or nanoparticle formulations.

TABLE 5
Lipids used for gene transfer

| Lipid | Abbreviation | Feature |
|---|---|---|
| 1,2-Dioleoyl-sn-glycero-3-phosphatidylcholine | DOPC | Helper |
| 1,2-Dioleoyl-sn-glycero-3-phosphatidylethanolamine | DOPE | Helper |
| Cholesterol | | Helper |
| N-[1-(2,3-Dioleyloxy)propyl]N,N,N-trimethylammonium chloride | DOTMA | Cationic |
| 1,2-Dioleoyloxy-3-trimethylammonium-propane | DOTAP | Cationic |
| Dioctadecylamidoglycylspermine | DOGS | Cationic |
| N-(3-Aminopropyl)-N,N-dimethyl-2,3-bis(dodecyloxy)-1- | GAP-DLRIE | Cationic |
| propanaminium bromide | | |
| Cetyltrimethylammonium bromide | CTAB | Cationic |
| 6-Lauroxyhexyl ornithinate | LHON | Cationic |
| 1-(2,3-Dioleoyloxypropyl)-2,4,6-trimethylpyridinium | 2Oc | Cationic |
| 2,3-Dioleyloxy-N-[2(sperminecarboxamido-ethyl]-N,N-dimethyl- | DOSPA | Cationic |
| 1-propanaminium trifluoroacetate | | |
| 1,2-Dioleyl-3-trimethylammonium-propane | DOPA | Cationic |
| N-(2-Hydroxyethyl)-N,N-dimethyl-2,3-bis(tetradecyloxy)-1- | MDRIE | Cationic |
| propanaminium bromide | | |
| Dimyristooxypropyl dimethyl hydroxyethyl ammonium bromide | DMRI | Cationic |
| 3β-[N-(N′,N′-Dimethylaminoethane)-carbamoyl]cholesterol | DC-Chol | Cationic |
| Bis-guanidium-tren-cholesterol | BGTC | Cationic |
| 1,3-Diodeoxy-2-(6-carboxy-spermyl)-propylamide | DOSPER | Cationic |
| Dimethyloctadecylammonium bromide | DDAB | Cationic |
| Dioctadecylamidoglicylspermidin | DSL | Cationic |
| rac-[(2,3-Dioctadecyloxypropyl)(2-hydroxyethyl)]- | CLIP-1 | Cationic |
| dimethylammonium chloride | | |
| rac-[2(2,3-Dihexadecyloxypropyl- | CLIP-6 | Cationic |
| oxymethyloxy)ethyl]trimethylammonium bromide | | |
| Ethyldimyristoylphosphatidylcholine | EDMPC | Cationic |
| 1,2-Distearyloxy-N,N-dimethyl-3-aminopropane | DSDMA | Cationic |
| 1,2-Dimyristoyl-trimethylammonium propane | DMTAP | Cationic |
| O,O′-Dimyristyl-N-lysyl aspartate | DMKE | Cationic |
| 1,2-Distearoyl-sn-glycero-3-ethylphosphocholine | DSEPC | Cationic |
| N-Palmitoyl D-erythro-sphingosyl carbamoyl-spermine | CCS | Cationic |
| N-t-Butyl-N0-tetradecyl-3-tetradecylaminopropionamidine | diC14-amidine | Cationic |
| Octadecenolyoxy[ethyl-2-heptadecenyl-3 hydroxyethyl] | DOTIM | Cationic |
| imidazolinium chloride | | |
| N1-Cholesteryloxycarbonyl-3,7-diazanonane-1,9-diamine | CDAN | Cationic |
| 2-(3-[Bis(3-amino-propyl)-amino]propylamino)-N- | RPR209120 | Cationic |
| ditetradecylcarbamoylme-ethyl-acetamide | | |
| 1,2-dilinoleyloxy-3-dimethylaminopropane | DLinDMA | Cationic |
| 2,2-dilinoleyl-4-dimethylaminoethyl-[1,3]-dioxolane | DLin-KC2- | Cationic |
| | DMA | |
| dilinoleyl-methyl-4-dimethylaminobutyrate | DLin-MC3- | Cationic |
| | DMA | |

TABLE 6
Polymers used for gene transfer

| Polymer | Abbreviation |
|---|---|
| Poly(ethylene)glycol | PEG |
| Polyethylenimine | PEI |
| Dithiobis(succinimidylpropionate) | DSP |
| Dimethyl-3,3′-dithiobispropionimidate | DTBP |
| Poly(ethylene imine) biscarbamate | PEIC |
| Poly(L-lysine) | PLL |
| Histidine modified PLL | |
| Poly(N-vinylpyrrolidone) | PVP |
| Poly(propylenimine) | PPI |
| Poly(amidoamine) | PAMAM |
| Poly(amido ethylenimine) | SS-PAEI |
| Triethylenetetramine | TETA |
| Poly(β-aminoester) | |
| Poly(4-hydroxy-L-proline ester) | PHP |
| Poly(allylamine) | |
| Poly(α-[4-aminobutyl]-L-glycolic acid) | PAGA |
| Poly(D,L-lactic-co-glycolic acid) | PLGA |
| Poly(N-ethyl-4-vinylpyridinium bromide) | |
| Poly(phosphazene)s | PPZ |
| Poly(phosphoester)s | PPE |
| Poly(phosphoramidate)s | PPA |
| Poly(N-2-hydroxypropylmethacrylamide) | pHPMA |
| Poly (2-(dimethylamino)ethyl methacrylate) | pDMAEMA |
| Poly(2-aminoethyl propylene phosphate) | PPE-EA |
| Chitosan | |
| Galactosylated chitosan | |
| N-Dodacylated chitosan | |
| Histone | |
| Collagen | |
| Dextran-spermine | D-SPM |

[0233] Non-viral vectors optionally include targeting modifications to improve uptake and/or selectively target certain cell types. These targeting modifications can include e.g., cell specific antigens, monoclonal antibodies, single chain antibodies, aptamers, polymers, sugars (e.g., N-acetylgalactosamine (GalNAc)), and cell penetrating peptides. Such vectors also optionally use fusogenic and endosome-destabilizing peptides/polymers, undergo acid-triggered conformational changes (e.g., to accelerate endosomal escape of the cargo), and/or incorporate a stimuli-cleavable polymer, e.g., for release in a cellular compartment. For example, disulfide-based cationic polymers that are cleaved in the reducing cellular environment can be used.

[0234] In certain embodiments, one or more nucleic acid molecules (e.g., DNA molecules) other than the components of a genome editing system, e.g., the RNA-guided nuclease component and/or the gRNA component described herein, are delivered. In certain embodiments, the nucleic acid molecule is delivered at the same time as one or more of the components of the Genome editing system. In certain embodiments, the nucleic acid molecule is delivered before or after (e.g., less than about 30 minutes, 1 hour, 2 hours, 3 hours, 6 hours, 9 hours, 12 hours, 1 day, 2 days, 3 days, 1 week, 2 weeks, or 4 weeks) one or more of the components of the Genome editing system are delivered. In certain embodiments, the nucleic acid molecule is delivered by a different means than one or more of the components of the genome editing system, e.g., the RNA-guided nuclease component and/or the gRNA component, are delivered. The nucleic acid molecule can be delivered by any of the delivery methods described herein. For example, the nucleic acid molecule can be delivered by a viral vector, e.g., an integration-deficient lentivirus, and the RNA-guided nuclease molecule component and/or the gRNA component can be delivered by electroporation, e.g., such that the toxicity caused by nucleic acids (e.g., DNAs) can be reduced. In certain embodiments, the nucleic acid molecule encodes a therapeutic protein, e.g., a protein described herein. In certain embodiments, the nucleic acid molecule encodes an RNA molecule, e.g., an RNA molecule described herein.

Delivery of RNPs and/or RNA Encoding Genome Editing System Components

[0235] RNPs (complexes of gRNAs and RNA-guided nucleases) and/or RNAs encoding RNA-guided nucleases and/or gRNAs, can be delivered into cells or administered to subjects by art-known methods, some of which are described in Cotta-Ramusino. In vitro, RNA-guided nuclease-encoding and/or gRNA-encoding RNA can be delivered, e.g., by microinjection, electroporation, transient cell compression or squeezing (see, e.g., Lee 2012). Lipid-mediated transfection, peptide-mediated delivery, GalNAc- or other conjugate-mediated delivery, and combinations thereof, can also be used for delivery in vitro and in vivo. A protective, interactive, non-condensing (PINC) system may be used for delivery.

[0236] In vitro delivery via electroporation comprises mixing the cells with the RNA encoding RNA-guided nucleases and/or gRNAs, with or without donor template nucleic acid molecules, in a cartridge, chamber or cuvette and applying one or more electrical impulses of defined duration and amplitude. Systems and protocols for electroporation are known in the art, and any suitable electroporation tool and/or protocol can be used in connection with the various embodiments of this disclosure.

### Route of Administration

[0237] Genome editing systems, or cells altered or manipulated using such systems, can be administered to subjects by any suitable mode or route, whether local or systemic. Systemic modes of administration include oral and parenteral routes. Parenteral routes include, by way of example, intravenous, intramarrow, intrarterial, intramuscular, intradermal, subcutaneous, intranasal, and intraperitoneal routes. Components administered systemically can be modified or formulated to target, e.g., HSCs, hematopoietic stem/progenitor cells, or erythroid progenitors or precursor cells.

[0238] Local modes of administration include, by way of example, intramarrow injection into the trabecular bone or intrafemoral injection into the marrow space, and infusion into the portal vein. In certain embodiments, significantly smaller amounts of the components (compared with systemic approaches) can exert an effect when administered locally (for example, directly into the bone marrow) compared to when administered systemically (for example, intravenously). Local modes of administration can reduce or eliminate the incidence of potentially toxic side effects that may occur when therapeutically effective amounts of a component are administered systemically.

[0239] Administration can be provided as a periodic bolus (for example, intravenously) or as continuous infusion from an internal reservoir or from an external reservoir (for example, from an intravenous bag or implantable pump). Components can be administered locally, for example, by continuous release from a sustained release drug delivery device.

[0240] In addition, components can be formulated to permit release over a prolonged period of time. A release system can include a matrix of a biodegradable material or a material which releases the incorporated components by diffusion. The components can be homogeneously or heterogeneously distributed within the release system. A variety of release systems can be useful, however, the choice of the appropriate system will depend upon rate of release required by a particular application. Both non-degradable and degradable release systems can be used. Suitable release systems include polymers and polymeric matrices, non-polymeric matrices, or inorganic and organic excipients and diluents such as, but not limited to, calcium carbonate and sugar (for example, trehalose). Release systems may be natural or synthetic. However, synthetic release systems are preferred because generally they are more reliable, more reproducible and produce more defined release profiles. The release system material can be selected so that components having different molecular weights are released by diffusion through or degradation of the material.

[0241] Representative synthetic, biodegradable polymers include, for example: polyamides such as poly(amino acids) and poly(peptides); polyesters such as poly(lactic acid), poly(glycolic acid), poly(lactic-co-glycolic acid), and poly(caprolactone); poly(anhydrides); polyorthoesters; polycarbonates; and chemical derivatives thereof (substitutions, additions of chemical groups, for example, alkyl, alkylene, hydroxylations, oxidations, and other modifications routinely made by those skilled in the art), copolymers and mixtures thereof. Representative synthetic, non-degradable polymers include, for example: polyethers such as poly(ethylene oxide), poly(ethylene glycol), and poly(tetramethylene oxide); vinyl polymers-polyacrylates and polymethacrylates such as methyl, ethyl, other alkyl, hydroxyethyl methacrylate, acrylic and methacrylic acids, and others such as poly(vinyl alcohol), poly(vinyl pyrolidone), and poly(vinyl acetate); poly(urethanes); cellulose and its derivatives such as alkyl, hydroxyalkyl, ethers, esters, nitrocellulose, and various cellulose acetates; polysiloxanes; and any chemical derivatives thereof (substitutions, additions of chemical groups, for example, alkyl, alkylene, hydroxylations, oxidations, and other modifications routinely made by those skilled in the art), copolymers and mixtures thereof.

[0242] Poly(lactide-co-glycolide) microsphere can also be used. Typically the microspheres are composed of a polymer of lactic acid and glycolic acid, which are structured to form hollow spheres. The spheres can be approximately 15-30 microns in diameter and can be loaded with components described herein. In some embodiments, genome editing systems, system components and/or nucleic acids encoding system components, are delivered with a block copolymer such as a poloxamer or a poloxamine.

### Multi-Modal or Differential Delivery of Components

[0243] Skilled artisans will appreciate, in view of the instant disclosure, that different components of genome editing systems disclosed herein can be delivered together or separately and simultaneously or nonsimultaneously. Separate and/or asynchronous delivery of genome editing system components can be particularly desirable to provide temporal or spatial control over the function of genome editing systems and to limit certain effects caused by their activity.

[0244] Different or differential modes as used herein refer to modes of delivery that confer different pharmacodynamic or pharmacokinetic properties on the subject component molecule, e.g., a RNA-guided nuclease molecule, gRNA, template nucleic acid, or payload. For example, the modes of delivery can result in different tissue distribution, different half-life, or different temporal distribution, e.g., in a selected compartment, tissue, or organ.

[0245] Some modes of delivery, e.g., delivery by a nucleic acid vector that persists in a cell, or in progeny of a cell, e.g., by autonomous replication or insertion into cellular nucleic acid, result in more persistent expression of and presence of a component. Examples include viral, e.g., AAV or lentivirus, delivery.

[0246] By way of example, the components of a genome editing system, e.g., a RNA-guided nuclease and a gRNA, can be delivered by modes that differ in terms of resulting half-life or persistent of the delivered component the body, or in a particular compartment, tissue or organ. In certain embodiments, a gRNA can be delivered by such modes. The RNA-guided nuclease molecule component can be delivered by a mode which results in less persistence or less exposure to the body or a particular compartment or tissue or organ.

[0247] More generally, in certain embodiments, a first mode of delivery is used to deliver a first component and a second mode of delivery is used to deliver a second component. The first mode of delivery confers a first pharmacodynamic or pharmacokinetic property. The first pharmacodynamic property can be, e.g., distribution, persistence, or exposure, of the component, or of a nucleic acid that encodes the component, in the body, a compartment, tissue or organ. The second mode of delivery confers a second pharmacodynamic or pharmacokinetic property. The second pharmacodynamic property can be, e.g., distribution, persistence, or exposure, of the component, or of a nucleic acid that encodes the component, in the body, a compartment, tissue or organ.

[0248] In certain embodiments, the first pharmacodynamic or pharmacokinetic property, e.g., distribution, persistence or exposure, is more limited than the second pharmacodynamic or pharmacokinetic property.

[0249] In certain embodiments, the first mode of delivery is selected to optimize, e.g., minimize, a pharmacodynamic or pharmacokinetic property, e.g., distribution, persistence or exposure.

[0250] In certain embodiments, the second mode of delivery is selected to optimize, e.g., maximize, a pharmacodynamic or pharmacokinetic property, e.g., distribution, persistence or exposure.

[0251] In certain embodiments, the first mode of delivery comprises the use of a relatively persistent element, e.g., a nucleic acid, e.g., a plasmid or viral vector, e.g., an AAV or lentivirus. As such vectors are relatively persistent product transcribed from them would be relatively persistent.

[0252] In certain embodiments, the second mode of delivery comprises a relatively transient element, e.g., an RNA or protein.

[0253] In certain embodiments, the first component comprises gRNA, and the delivery mode is relatively persistent, e.g., the gRNA is transcribed from a plasmid or viral vector, e.g., an AAV or lentivirus. Transcription of these genes would be of little physiological consequence because the genes do not encode for a protein product, and the gRNAs are incapable of acting in isolation. The second component, a RNA-guided nuclease molecule, is delivered in a transient manner, for example as mRNA or as protein, ensuring that the full RNA-guided nuclease molecule/gRNA complex is only present and active for a short period of time.

[0254] Furthermore, the components can be delivered in different molecular form or with different delivery vectors that complement one another to enhance safety and tissue specificity.

[0255] Use of differential delivery modes can enhance performance, safety, and/or efficacy, e.g., the likelihood of an eventual off-target modification can be reduced. Delivery of immunogenic components, e.g., Cas9 molecules, by less persistent modes can reduce immunogenicity, as peptides from the bacterially-derived Cas enzyme are displayed on the surface of the cell by MHC molecules. A two-part delivery system can alleviate these drawbacks.

[0256] Differential delivery modes can be used to deliver components to different, but overlapping target regions. The formation active complex is minimized outside the overlap of the target regions. Thus, in certain embodiments, a first component, e.g., a gRNA is delivered by a first delivery mode that results in a first spatial, e.g., tissue, distribution. A second component, e.g., a RNA-guided nuclease molecule is delivered by a second delivery mode that results in a second spatial, e.g., tissue, distribution. In certain embodiments, the first mode comprises a first element selected from a liposome, nanoparticle, e.g., polymeric nanoparticle, and a nucleic acid, e.g., viral vector. The second mode comprises a second element selected from the group. In certain embodiments, the first mode of delivery comprises a first targeting element, e.g., a cell specific receptor or an antibody, and the second mode of delivery does not include that element. In certain embodiments, the second mode of delivery comprises a second targeting element, e.g., a second cell specific receptor or second antibody.

[0257] When the RNA-guided nuclease molecule is delivered in a virus delivery vector, a liposome, or polymeric nanoparticle, there is the potential for delivery to and therapeutic activity in multiple tissues, when it may be desirable to only target a single tissue. A two-part delivery system can resolve this challenge and enhance tissue specificity. If the gRNA and the RNA-guided nuclease molecule are packaged in separated delivery vehicles with distinct but overlapping tissue tropism, the fully functional complex is only be formed in the tissue that is targeted by both vectors.

### EXAMPLES

[0258] The principles and embodiments described above are further illustrated by the non-limiting examples that follow:

### Example 1: Screening of S. pyogenes gRNAs Delivered to K562 Cells as Ribonucleoprotein Complexes for Use in Causing 13 nt Deletions in HBG1 and HBG2 Regulatory Regions

[0259] gRNAs targeting a 26 nt fragment spanning and including the 13 nucleotides at the 13 nt target region of HBG1 and HBG2 were designed by standard methods. After gRNAs were designed in silico and tiered, a subset of the gRNAs were selected and screened for activity and specificity in human K562 cells. The gRNAs selected for screening are set forth in Table 7. Briefly, gRNAs were in vitro transcribed and then complexed with S. pyogenes wildtype (Wt) Cas9 protein to form ribonucleoprotein complexes (RNPs). The gRNAs complexed to S. pyogenes Cas9 protein were modified sgRNAs ((e.g., 5′ ARCA capped and 3′ polyA (20A) tail; Table 7) and target the HBG1 and HBG2 regulatory regions. To allow for direct comparison of the activity of these RNPs in K562 cells and human CD34⁺ cells, RNPs were first delivered to K562 cells by electroporation (Amaxa Nucleofector).

[0260] Three days after RNP electroporation, gDNA was extracted from K562 cells and then the HBG1 and HBG2 loci were PCR amplified from the gDNA. Gene editing was evaluated in the PCR products by T7E1 endonuclease assay analysis. Eight out of nine RNPs supported a high percentage of NHEJ. Sp37 RNP, the only gRNA shown to be active in human CD34⁺ cells (<10% editing in CD34⁺ cells) was highly active in K562 cells, with >60% indels detected at both HBG1 and HBG2 and eight cut in both the HBG1 and HBG2 targeted regions in the promoter sequences (FIG. 3A).

TABLE 7
Selected gRNAs for screening in K562 cells or
CD34⁺ cells

| | | | Targeting | Targeting | |
|---|---|---|---|---|---|
| | | | domain | domain | |
| | Targeting | Targeting | sequence | sequence | |
| | domain | domain | plus PAM | plus PAM | |
| gRNA | sequence | sequence | (NGG) | (NGG) | |
| ID | (RNA) | (DNA) | (RNA) | (DNA) | Sense |
| Sp9 | GGCUAUUGG | GGCTATTGG | GGCUAUUGG | GGCTATTGG | Anti- |
| | UCAAGGCA | TCAAGGCA | UCAAGGCAA | TCAAGGCAA | sense |
| | (SEQ ID | (SEQ ID | GG | GG | |
| | NO: 277) | NO: 910) | (SEQ ID | (SEQ ID | |
| | | | NO: 920) | NO: 930) | |
| Sp36 | CAAGGCUAU | CAAGGCTAT | CAAGGCUAU | CAAGGCTAT | Anti- |
| | UGGUCAAGG | TGGTCAAGG | UGGUCAAGG | TGGTCAAGG | sense |
| | CA | CA | CAAGG | CAAGG | |
| | (SEQ ID | (SEQ ID | (SEQ ID | (SEQ ID | |
| | NO: 338) | NO: 911) | NO: 921) | NO: 931) | |
| Sp40 | UGCCUUGUC | TGCCTTGTC | UGCCUUGUC | TGCCTTGTC | Anti- |
| | AAGGCUAU | GAAGCTAT | AAGGCUAUU | AAGGCTATT | sense |
| | (SEQ ID | (SEQ ID | GG | GG | |
| | NO: 327) | NO: 912) | (SEQ ID | (SEQ ID | |
| | | | NO: 922) | NO: 932) | |
| Sp42 | GUUUGCCUU | GTTTGCCTT | GUUUGCCUU | GTTTGCCTT | Anti- |
| | GUCAAGGCU | GTCAAGGCT | GUCAAGGCU | GTCAAGGCT | sense |
| | AU | AT | AUUGG | ATTGG | |
| | (SEQ ID | (SEQ ID | (SEQ ID | (SEQ ID | |
| | NO: 299) | NO: 913) | NO: 923) | NO: 933) | |
| Sp38 | GACCAAUAG | GACCAATAG | GACCAAUAG | GACCAATAG | Sense |
| | CCUUGACA | CCTTGACA | CCUUGACAA | CCTTGACAA | |
| | (SEQ ID | (SEQ ID | GG | GG | |
| | NO: 276) | NO: 914) | (SEQ ID | (SEQ ID | |
| | | | NO: 924) | NO: 934) | |
| Sp37 | CUUGACCAA | CTTGACCAA | CUUGACCAA | CTTGACCAA | Sense |
| | UAGCCUUGA | TAGCCTTGA | UAGCCUUGA | TAGCCTTGA | |
| | CA | CA | CAAGG | CAAGG | |
| | (SEQ ID | (SEQ ID | (SEQ ID | (SEQ ID | |
| | NO: 333) | NO: 915) | NO: 925) | NO: 935) | |
| Sp43 | GUCAAGGCU | GTCAAGGCT | GUCAAGGCU | GTCAAGGCT | Anti- |
| | AUUGGUCA | ATTGGTCA | AUUGGUCAA | ATTGGTCAA | sense |
| | (SEQ ID | (SEQ ID | GG | GG | |
| | NO: 278) | NO: 916) | (SEQ ID | (SEQ ID | |
| | | | NO: 926) | NO: 936) | |
| Sp35 | CUUGUCAAG | CTTGTCAAG | CUUGUCAAG | CTTGTCAAG | Anti- |
| | GCUAUUGGU | GCTATTGGT | GCUAUUGGU | GCTATTGGT | sense |
| | CA | CA | CAAGG | CAAGG | |
| | (SEQ ID | (SEQ ID | (SEQ ID | (SEQ ID | |
| | NO: 339) | NO: 917) | NO: 927) | NO: 937) | |
| Sp41 | UCAAGUUUG | TCAAGTTTG | UCAAGUUUG | TCAAGTTTG | Anti- |
| | CCUUGUCA | CCTTGTCA | CCUUGUCAA | CCTTGTCAA | sense |
| | (SEQ ID | (SEQ ID | GG | GG | |
| | NO: 310) | NO: 918) | (SEQ ID | (SEQ ID | |
| | | | NO: 928) | NO: 938) | |
| Sp34 | UGGUCAAGU | TGGTCAAGT | UGGUCAAGU | TGGTCAAGT | Anti- |
| | UUGCCUUGU | TTGCCTTGT | UUGCCUUGU | TTGCCTTGT | sense |
| | CA | CA | CAAGG | CAAGG | |
| | (SEQ ID | (SEQ ID | (SEQ ID | (SEQ ID | |
| | NO: 340) | NO: 919) | NO: 929) | NO: 939) | |
| Sp85 | AGUAUCCAG | AGTATCCAG | AGUAUCCAG | AGTATCCAG | Anti- |
| | UGAGGCCA | TGAGGCCA | UGAGGCCAG | TGAGGCCAG | sense |
| | (SEQ ID | (SEQ ID | GG | GG | |
| | NO: 940) | NO: 943) | (SEQ ID | (SEQ ID | |
| | | | NO: 946) | NO: 949) | |
| SpA | GGCAAGGCU | GGCAAGGCT | GGCAAGGCU | GGCAAGGCT | Sense |
| | GGCCAACCC | GGCCAACCC | GGCCAACCC | GGCCAACCC | |
| | AU | AT | AUGGG | ATGGG | |
| | (SEQ ID | (SEQ ID | (SEQ ID | (SEQ ID | |
| | NO: 941) | NO: 944) | NO: 947) | NO: 950) | |
| SpB | UAUUUGCAU | TATTTGCAT | UAUUUGCAU | TATTTGCAT | Sense |
| | UGAGAUAGU | TGAGATAGT | UGAGAUAGU | TGAGATAGT | |
| | GU | GT | GUGGG | GTGGG | |
| | (SEQ ID | (SEQ ID | (SEQ ID | (SEQ ID | |
| | NO: 942) | NO: 945) | NO: 948) | NO: 951) | |

[0261] The HBG1 and HBG2 PCR products for the K562 cells that were targeted with the eight active sgRNAs were then analyzed by DNA sequencing analysis and scored for insertions and deletions detected. The deletions were subdivided into precise 13 nt deletions at the target site, 13 nt target site inclusive and proximal small deletions (18-26 nt), 12 nt deletions (i.e., partial deletion) of the 13 nt target site, >26 nt deletions that span a portion of the HPFH target site, and other deletions, e.g., deletions proximal to but outside the HPFH target site. Seven of the eight sgRNAs targeted deletion of the 13 nt (HPFH mutation induction) (FIG. 3B) for HBG1. At least five of the eight sgRNAs also supported targeted deletion of the 13 nt in HBG2 promoter region (FIG. 3C). Note that DNA sequence results for HBG2 in cells treated with HBG Sp34 sgRNA were not available. These data indicate that Cas9 and sgRNA support precise induction of the 13 nt deletions. FIGS. 3B-3C depict examples of the types of deletions observed in target sequences in HBG1.

### Example 2: Cas9 RNP Containing gRNA Targeting the 13 nt Deletion Mutation Supports Gene Editing in Human Hematopoietic Stem/Progenitor Cells

[0262] Of the RNPs containing different gRNAs tested in human cord blood (CB) CD34⁺ cells, only Sp37 resulted in detectable editing at the target site in the HBG1 and HBG2 promoters as determined by T7E1 analysis of indels in HBG1 and HBG2 specific PCR products amplified from gDNA extracted from electroporated CB CD34⁺ cells from a three cord blood donors (FIG. 4A). The average level of editing detected in cells electroporated with Cas9 protein complexed to Sp37 was 5±2% indels at HBG1 and 3±1% indels detected at HBG2 (3 separate experiments, and CB donors).

[0263] Next, three S. pyogenes gRNAs whose target sites are within the HBG promoter (Sp35, Sp36, Sp37) were complexed to wild-type S. pyogenes Cas9 protein to form ribonucleoprotein complexes. These HBG targeted RNPS were electroporated into CB CD34⁺ cells (n=3 donors) and adult mobilized peripheral blood (mPB) CD34⁺ cell donors (n=3 donors). Then the level of insertions/deletions at the target site was analyzed by T7E1 endonuclease analysis of the HBG2 PCR products amplified from genomic DNA extracted from the samples approximately 3 days after Cas9 RNP delivery. Each of these RNPs supported only low level gene editing in both the CB and adult CD34⁺ cells across 3 donors and 3 separate experiments (FIG. 4B).

[0264] To increase gene editing and the occurrence of the 13 nt deletion at the target site, single strand deoxynucleotide donor repair templates (ssODNs) that encoded 87 nt and 89 nt of homology on each side of the targeted deletion site was generated. The ssODNs, either unmodified at the ends (i.e., ssODN1, SEQ ID NO:906, Table 8) or modified to contain phosphorothioates (PhTx) at the 5′ and 3′ ends (i.e., PhTx ssODN1, SEQ ID NO:909, Table 8). The ssODN was designed to ‘encode’ the 13 nt deletion with sequence homology arms engineered flanking this absent sequence to create a perfect deletion.

TABLE 8
Single strand deoxynucleotide donor
repair templates (ssODN)

| | SEQ | |
|---|---|---|
| ssODN | ID | |
| ID | NO | Sequence |
| ssODN1 | 904 | GGGTGCTTCCTTTTATTCTT |
| 5′ | | CATCCCTAGCCAGCCGCCGG |
| homology | | CCCCTGGCCTCACTGGATAC |
| arm | | TCTAAGACTATTGGTCAAGT |
| | | TTGCCTT |
| ssODN1 | 905 | GTCAAGGCAAGGCTGGCCAA |
| 3′ | | CCCATGGGTGGAGTTTAGCC |
| homology | | AGGGACCGTTTCAGACAGAT |
| arm | | ATTTGCATTGAGATAGTGTG |
| | | GGGAAGGGG |
| ssODN1 | 906 | GGGTGCTTCCTTTTATTCTT |
| | | CATCCCTAGCCAGCCGCCGG |
| | | CCCCTGGCCTCACTGGATAC |
| | | TCTAAGACTATTGGTCAAGT |
| | | TTGCCTTGTCAAGGCAAGGC |
| | | TGGCCAACCCATGGGTGGAG |
| | | TTTAGCCAGGGACCGTTTCA |
| | | GACAGATATTTGCATTGAGA |
| | | TAGTGTGGGGAAGGGG |
| PhTx | 907 | *GGGTGCTTCCTTTTATTCT |
| ssODN1 | | TCATCCCTAGCCAGCCGCCG |
| 5′ | | GCCCCTGGCCTCACTGGATA |
| homology | | CTCTAAGACTATTGGTCAAG |
| arm | | TTTGCCTT |
| PhTx | 908 | GTCAAGGCAAGGCTGGCCAA |
| ssODN1 | | CCCATGGGTGGAGTTTAGCC |
| 3′ | | AGGGACCGTTTCAGACAGAT |
| homology | | ATTTGCATTGAGATAGTGTG |
| arm | | GGGAAGGGG* |
| PhTx | 909 | *GGGTGCTTCCTTTTATTCT |
| ssODN1 | | TCATCCCTAGCCAGCCGCCG |
| | | GCCCCTGGCCTCACTGGATA |
| | | CTCTAAGACTATTGGTCAAG |
| | | TTTGCCTTGTCAAGGCAAGG |
| | | CTGGCCAACCCATGGGTGGA |
| | | GTTTAGCCAGGGACCGTTTC |
| | | AGACAGATATTTGCATTGAG |
| | | ATAGTGTGGGGAAGGGG* |

The homology arms flanking the deletion are indicated by bold [5′ homology arm] and underline [3′ homology arm]). Note the absence of the 13 bp sequence in ssODN1 and PhTx ssODN1.
*Represents modification by phosphorothioate.

[0265] ssODN1 and PhTx ssODN1 were co-delivered with RNP targeting HBG containing the Sp37 gRNA (HBG Sp37 RNP) or HBG Sp35 (HBG Sp35 RNP) to CB CD34⁺ cells. Co-delivery of the ssODN donor encoding the 13 nt deletion with HBG Sp35 RNP or HBG Sp37 RNP led to a 6-fold and 5-fold increase in gene editing of the target site, respectively, as determined by T7E1 analysis of the HBG2 PCR product (FIG. 4C). DNA sequencing analysis (Sanger sequencing) of the HBG2 PCR product indicated that 20% gene editing in cells that were treated with HBG Sp37 RNP and the PhTx modified ssODN1, with 15% deletions and 5% insertions (FIG. 4C, lower left panel). Further analysis of the specific type and size of deletions at the target site revealed that 75% of the total deletions detected contained the 13 nt deletion (which included deletion at c. −110-−115 of the CAAT box in the proximal promoter), the absence of which is associated with elevation of HbF expression (FIG. 4C, lower right panel). The remaining ¼ of deletions were partial deletions that did not span the full 13 nt deletion. These data indicate that co-delivery of a homologous ssODN that is engineered to have a deletion supported precise gene editing (deletion) at HBG in human CD34⁺ cells.

### Example 3: Cas9 RNP Targeting the 13 nt Deletion Mutation Supports Gene Editing in Human Adult Mobilized Peripheral Blood Hematopoietic Stem/Progenitor Cells with Increased HBG Expression in Erythroblast Progeny

[0266] To determine whether editing HBG with Cas9 RNP complexed to Sp37 gRNA or Sp35 gRNA (i.e., the gRNAs that target the 13 nt deletion that is associated with HPFH) in the promoter of HBG supports an increase in HBG expression in erythroid progeny of edited CD34⁺ cells, human adult CD34⁺ cells from mobilized peripheral blood (mPB) were electroporated with the RNPs. Briefly, mPB CD34⁺ cells were prestimulated for 2 days with human cytokines and PGE2 in StemSpan SFEM and then electroporated with Cas9 protein precomplexed to Sp35 and Sp37, respectively. T7E1 analysis of HBG PCR product indicated ˜3% indels detected for mPB CD34⁺ cells treated with RNP complexed to Sp37 while no editing was detected for cells that were treated with RNP complexed to Sp35 (FIG. 5A).

[0267] In order to increase gene editing at the target site and to increase the occurrence of the 13 nt deletion at the target site, PhTx ssODN1 (SEQ ID NO:909) was co-delivered with the precomplexed RNP targeting HBG containing the Sp37 gRNA. Co-delivery of the ssODN donor encoding the 13 nt deletion led to a nearly 2-fold increase in gene editing of the target site (FIG. 5A). To determine whether editing HBG increases production of fetal hemoglobin in erythroid progeny of edited adult CD34⁺ cells, the cells were differentiated into erythroblasts by culture for up to 18 days in the presence of human cytokines (erythropoietin, SCF, IL3), human plasma (Octoplas), and other supplements (hydrocortisone, heparin, transferrin). Over the time course of differentiation, mRNA was collected to evaluate HBG gene expression in the erythroid progeny of RNP treated mPB CD34⁺ cells and donor matched negative (untreated) controls. By day 7 of differentiation, erythroblast progeny of human CD34⁺ cells that were treated with HBG Sp37 RNP and 13 nt deletion encoding ssODN (˜5% indels detected in gDNA from the bulk cell population by T7E1 analysis) exhibited a 2-fold increase in HBG mRNA production (FIG. 5B). Importantly, CD34⁺ cells that were electroporated with HBG RNP maintained their ex vivo hematopoietic activity (i.e., no difference in the quantity or diversity of erythroid and myeloid colonies compared to untreated donor matched CD34⁺ cell negative control), as determined in hematopoietic colony forming cell (CFC) assays (FIG. 6A). Furthermore, the erythroblasts differentiated from RNP treated CD34⁺ cells maintained the kinetics of differentiation observed for donor matched untreated control cells as determined by flow analysis for acquisition of erythroid phenotype (% Glycophorin A⁺ cells) (FIG. 6B). These data indicate that targeted disruption of HBG1/HBG2 proximal promoter region supported an increase in HBG expression in erythroid progeny of RNP treated adult hematopoietic stem/progenitor cells without altering differentiation potential.

### Example 4: Cas9 RNP Targeting the HPFH Mutation Supports Gene Editing in Human Adult Mobilized Peripheral Blood Hematopoietic Stem/Progenitor Cells with Increased HBG Expression in Erythroblast Progeny

[0268] To determine whether co-delivery of paired nickase RNPs targeting HBG would increase targeted disruption of the proximal HBG promoter, mPB CD34⁺ cells were cultured for 2 days with human cytokines and PGE2 in StemSpan SFEM and then electroporated with S. pyogenes D10A Cas9 protein precomplexed to two gRNAs that target sites flanking the site of the 13 nt deletion. The targeting domain sequences for gRNAs used in nickase pairs in this example (including, without limitation, SpA, Sp85 and SpB) are presented in Table 7. D10A nickase pairs were selected such that the PAMs for the targets were oriented outward and the distance between the cut sites were <100 nt. gRNAs were complexed with D10A Cas9 protein to form RNP complexes and then human CD34⁺ cells and paired nickase were subject to electroporation. To determine whether co-delivery of an ssODN that encoded the 13 nt deletion would increase editing and introduction of the mutation into the cells, in some experiments, ssODN1 was added to the cell RNP mixture prior to electroporation. Approximately 3 days after electroporation, gDNA was extracted from the RNP treated cells and analyzed by T7E1 endonuclease assay and/or Sanger DNA sequencing of HBG2 PCR products amplified from the extracted gDNA. Of the three D10A nickase pairs tested, indels detected by T7E1 endonuclease analysis were increased for one nickase pair (gRNAs SpA+Sp85) samples for which ssODN1 was included (FIG. 7A). DNA sequencing analysis was performed on limited samples shown in FIG. 7A. DNA sequencing analysis showed up to ˜27% indels at the target site, with insertions as the dominant indel detected, followed by deletions of the targeted region (area between the cut sites of the paired nickases), and the 13 nt deletion mutation was also detected at a frequency of 2-3% when ssODN1 encoding the deletion was co-delivered (FIG. 7B). Silent, non-pathogenic SNPs were included in the ssODN1 donor template, and were detected in the sequences that contained the 13 nt deletion, indicating that creation of the HFPH mutation occurred through an HDR event.

### Example 5: D10A Paired RNPs Electroporated into Adult CD34⁺ Cells Supports Induction of HbF Protein in Erythroid Progeny

[0269] To further optimize editing conditions in mPB CD34⁺ cells at the target site and to evaluate editing in additional human cell donors, human mPB CD34⁺ cells were electroporated with D10A Cas9 and WT Cas9 paired RNPs targeting HBG. The most efficient guide pair for both D10A Cas9 and WT Cas9 RNPs was Sp37+SpA, which supported >30% indels as determined by T7E1 endonuclease analysis of HBG2 PCR products (FIG. 8A). Given that editing at both HBG1 and HBG2 could result in large deletions of HBG2 and the intergenic region between HBG2 and HBG1, indels were further characterized in order to capture local indels by T7E1 endonuclease assay and sequencing and large deletion by ddPCR analysis. Large deletions were detected in all samples at variable frequencies for both D10A Cas9 and WT Cas9 RNP nickase pairs (FIG. 8B). Illumina sequencing analysis of indels correlated with indels determined by T7E1 analysis (FIG. 8C-8D).

[0270] To determine whether CD34⁺ cells edited with dual nickases at the HBG promoter gave rise to erythroid progeny with elevated HbF expression, donor matched RNP treated and untreated controls were induced toward erythroid differentiation and then evaluated for maintenance of indels during differentiation and for expression of HbF mRNA and protein. The level of editing (as determined by T7E1 endonuclease assay) was evaluated over the first 2 weeks of erythroid differentiation in the progeny of RNP treated cells prior to enucleation. Indels were detected in the erythroid progeny at every time point assayed suggesting that the editing that occurred in the CD34⁺ cells was maintained during erythroid differentiation and that edited CD34⁺ cells maintain erythroid differentiation potential.

[0271] The levels of HBG mRNA (day 10 of differentiation) and HbF protein (day 20-23 of differentiation) were quantified by ddPCR and HPLC analysis (according to the HPLC method described in Chang 2017 at pp. 143-44, incorporated by reference herein), respectively (FIG. 9). A ˜2-fold increase (+40% in in HBG transcripts vs. unedited donor matched control) was observed for HBG:HBA ratio (data not shown) and the ratio of HbF/HbF+HbA (i.e., HBG mRNA/HGB+HBB mRNA) increased to 30% above the level detected in donor matched untreated control samples.

[0272] For the D10A Cas9 nickase pairs, upregulation of HbF mRNA and protein was detected in erythroid progeny (FIG. 9). With respect to HbF protein analysis, two pairs supported 20% HbF induction for two D10A nickase pairs. No HbF upregulation was detected in erythroid progeny of WT Cas9 RNP treated CD34⁺ cells (data not shown).

### Example 6: Increasing the Dose of RNP Increases Total Editing Efficiency in Human Adult CD34⁺ Cells at the HBG Locus

[0273] The concentration of D10A Cas9 RNP for the nickase pair SpA+Sp85 was increased (2.5 μM standard concentration and 3.7 μM) and delivered to mPB CD34⁺ cells by electroporation. The increased RNP concentration supported an increase in indels at the HBG target site to >30% (FIG. 10A) as determined by T7E1 endonuclease analysis of the HBG PCR product amplified for gDNA extracted 3 days after electroporation of CD34⁺ cells. Sequencing analysis indicated that increasing the RNP concentration increased insertions (FIG. 10B). Erythroid progeny of RNP treated CD34⁺ cells also had an increase in HbF protein production (FIG. 10C). Importantly, the hematopoietic colony forming potential was maintained after editing (FIG. 10D). These cells were then transplanted into immunodeficient mice and their engraftment 1 month (FIG. 10E) and 2 months (FIG. 10F) after transplantation was evaluated by sampling the peripheral blood and measuring the percentage of human CD45⁺ cells. Early engraftment data showed no difference in engraftment between recipient cohorts of donor matched untreated controls (0 μM RNP) and mice transplanted with RNP treated cells. Furthermore, there was no difference in human blood lineage distribution (myeloid, B cell, T cell) within the human CD45⁺ fraction among cohorts at indicated time points (FIG. 10G-H).

[0274] Two additional D10A nickase pairs were also tested in RNP dose response studies in adult mPB CD34⁺ cells (Sp37+SpA, Sp37+SpB). Here, mPB CD34⁺ cells were electroporated with D10A paired nickases delivered at 0, 2.5, and 3.75 M of total RNP. RNP treated cells were differentiated into erythroid progeny and the HbF protein levels (% HbF/HbF+HbA) were analyzed by HPLC analysis. The indel frequency detected in CD34⁺ cells was plotted with the HbF levels detected in erythroid progeny in order to correlate editing and HbF induction (FIG. 11A). RNP treated and untreated control mPB CD34⁺ cells were also differentiated into colonies to evaluate ex vivo hematopoietic activity. Colony forming cell (CFC) activity was maintained for the progeny of RNP treated and donor matched untreated control CD34⁺ cells (FIG. 11B). There was no difference in the percentage of human CD45⁺ cells in the mouse peripheral blood 1 month after transplantation and no difference in blood lineage distribution (FIG. 11C-D) for cells exposed to different D10A RNP pairs at different doses compared to untreated donor matched control CD34⁺ cells.

### Example 7: Co-Delivery of RNP Targeting the Erythroid Specific Enhancer of BCL11A and a Non-Specific (N) Single Strand Deoxynucleotide Sequence or Paired RNPs Increases Gene Editing in Human CD34⁺ Cells and Supports Induction of Fetal Hemoglobin Expression in Erythroid Progeny

[0275] Fetal hemoglobin expression can be induced through targeted disruption of the erythroid cell specific expression of a transcriptional repressor, BCL11A (Canvers 2015). One potential strategy to increase HbF expression through a gene editing strategy is to multiplex gene editing for introduction of 13 nt deletion associated in the HBG proximal promoter and also for targeted disruption of the GATA1 binding motif in the erythroid specific enhancer of BCL11A that is in the +58 DHS region of intron 2 of the BCL11A gene (FIG. 12). In order to accomplish this multiplex strategy to increase HbF expression through multiplex gene editing, the effect of disruption of BCL11A erythroid enhancer (BCL11Ae) must first be determined as a single editing event.

[0276] In this experiment, CB CD34⁺ cells were electroporated with S. pyogenes WT Cas9 complexed to in vitro transcribed sgRNA targeting the GATA1 motif in the +58 DHS region of intron 2 of BCL11A gene (gRNA SpK, Table 9) (FIG. 13A). To determine whether co-delivery of a non-target specific ssODN would increase editing of the target sequence, BCL11Ae RNP was co-delivered with ssODN (which is nonhomologous to the BCL11Ae target sequence, also called a non-specific ssODN) in CB CD34⁺ cells. T7E1 analysis of BCL11A erythroid enhancer PCR product from gDNA extracted from CB CD34⁺ cells treated with BCL11Ae RNP indicated that ˜5% indels was achieved (FIG. 13A). Co-delivery of BCL11Ae RNP with a non-target specific ssODN increase in indels by 5-fold to 20% as detected by T7E1 endonuclease analysis. Illumina sequencing analysis indicated that >90% of edits had disruption of the GATA1 motif in the +DHS 58 region enhancer in intron 2 of the BCL11A gene (data not shown). To increase editing, human CB CD34⁺ cells were electroporated with WT Cas9 RNP (single gRNAs complexed to WT Cas9) or with WT Cas9 paired RNPs (paired gRNAs complexed to WT Cas9), so that the cut sites in each pair flank the target site for excision of the GATA1 motif (gRNAs SpC, SpK, SpM, SpN) (Table 9). Two of the single gRNAs and two pairs had >50% indels as determined by T7E1 endonuclease analysis (FIG. 13B).

TABLE 9
Select gRNA sequences targeting BCL11A
erythroid enhancer for screening in
CD34⁺ cells

| | | | Targeting | Targeting | |
|---|---|---|---|---|---|
| | | | domain | domain | |
| | Targeting | Targeting | sequence | sequence | |
| | domain | domain | plus PAM | plus PAM | |
| gRNA | sequence | sequence | (NGG) | (NGG) | |
| ID | (RNA) | (DNA) | (RNA) | (DNA) | Sense |
| SpK | CUAACAGUU | CTAACAGTT | CUAACAGUU | CTAACAGTT | Anti- |
| | GCUUUUAUC | GCTTTTATC | GCUUUUAUC | GCTTTTATC | sense |
| | AC | AC | ACAGG | ACAGG | |
| | (SEQ ID | (SEQ ID | (SEQ ID | (SEQ ID | |
| | NO: 952) | NO: 956) | NO: 960) | NO: 964) | |
| SpM | GGGCGUGGG | GGGCGTGGG | GGGCGUGGG | GGGCGTGGG | Anti- |
| | UGGGGUAGA | TGGGGTAGA | UGGGGUAGA | TGGGGTAGA | sense |
| | AG | AG | GAGAG | AGAGG | |
| | (SEQ ID | (SEQ ID | (SEQ ID | (SEQ ID | |
| | NO: 953) | NO: 957) | NO: 961) | NO: 965) | |
| SpN | CUCUUAGAC | CTCTTAGAC | CUCUUAGAC | CTCTTAGAC | Anti- |
| | AUAACACAC | ATAACACAC | AUAACACAC | ATAACACAC | sense |
| | CA | CA | CAGGG | CAGGG | |
| | (SEQ ID | (SEQ ID | (SEQ ID | (SEQ ID | |
| | NO: 954) | NO: 958) | NO: 962) | NO: 966) | |
| SpC | AUCAGAGGC | ATCAGAGGC | AUCAGAGGC | ATCAGAGGC | Sense |
| | CAAACCCUU | CAAACCCTT | CAAACCCUU | CAAACCCTT | |
| | CC | CC | CCUGG | CCTGG | |
| | (SEQ ID | (SEQ ID | (SEQ ID | (SEQ ID | |
| | NO: 955) | NO: 959) | NO: 963) | NO: 967) | |

[0277] Next, human adult bone marrow CD34⁺ cells were electroporated with the BCL11Ae RNP. DNA sequencing analysis of the BCL11A PCR product amplified from gDNA extracted from marrow CD34⁺ cells indicated 15% gene editing comprised of insertions and deletions (FIG. 14A). Importantly, all deletions resulted in deletion of the GATA1 motif and all insertions disrupted GATA1 motif through addition of a small number of bp in the motif. CD34⁺ cells were plated into colony forming assays and the mixed hematopoietic colonies (GEMMs), which correspond to CD34⁺ cell clones, were picked. gDNA was isolated and analyzed by Illumina sequencing to quantify monoallelic and biallelic disruption of the target site. Most GEMMs differentiated from the CD34⁺ cell clones had monoallelic disruption and biallelic disruption was also detected, with the overall indel rate ˜2/3 higher compared to what was detected in the bulk CD34⁺ cell population (FIG. 14B). This was likely a reflection of the percentage of common myeloid progenitors (CMPs) that give rise to GEMMs that make up a larger fraction of the heterogeneous CD34⁺ cells versus the other lineages present, but not captured/differentiated in the short-term CFC assays. The RNP treated marrow CD34⁺ cells also maintained similar kinetics of erythroid maturation (enucleation, FIG. 14C) and differentiation (phenotype acquisition, FIG. 14D) compared to donor matched untreated control cells. Erythroid progeny of edited marrow CD34⁺ cells exhibited ˜5-fold increase in HbF induction as determined by flow cytometry analysis (FIG. 14E).

[0278] Gene editing and induction of fetal hemoglobin was also evaluated in human adult mPB CD34⁺ cells. Co-delivery of BCL11Ae RNP and a non-specific ssODN supported ˜20% indels at the target site (FIG. 15A). To evaluate early induction of fetal hemoglobin in erythroid progeny of edited cells, mPB CD34⁺ cells were differentiated into erythroblasts and induction of fetal hemoglobin transcription (HBG mRNA) was evaluated by qRT-PCR analysis. The erythroid progeny of BCL11Ae RNP treated CD34⁺ cells exhibited a 2-fold induction of HBG mRNA compared to untreated controls, suggesting induction of fetal hemoglobin expression (FIG. 15B). The RNP treated marrow CD34⁺ cells also maintained similar kinetics of differentiation (phenotype acquisition, FIG. 15C) compared to donor matched untreated control cells.

### Example 8: Co-Delivery of S. pyogenes Cas9 Protein Complexed to a Truncated (15-Mer) “Dead” gRNA Increases Editing of the HBG Promoter Region in Adult Mobilized Peripheral Blood (mPB) CD34⁺ Cells

[0279] Delivery of a single wild-type (WT) ribonucleoprotein (RNP) (e.g., WT Cas9 protein complexed to Sp37 guide RNA (gRNA), see Table 10) targeting the HBG promoter supports ˜1.5% indels editing in human CD34⁺ cells (see International Patent Application No. PCT/US17/22377 by Gori et al., filed Mar. 14, 2017, which is incorporated by reference herein). It was hypothesized that co-delivery of a dead RNP (dRNP), comprised of a catalytically active WT Cas9 protein and a truncated dead gRNA (dgRNA) that binds proximal to the target site in the HBG promoter (−110 nt) would increase the accessibility of a WT RNP (e.g., catalytically active WT Cas9 complexed to a full-length gRNA (e.g., Sp37 gRNA, see Table 10)) to the target site. Therefore, dead guide RNAs (dgRNAs) were designed that target the regions proximal to the −110 target site in the HBG promoter and have a truncated targeting domain (see FIG. 16 and Table 10).

[0280] To increase editing at the target site in mobilized peripheral blood (mPB) CD34⁺ cells, WT Cas9 protein was complexed to a truncated gRNA (i.e., dead (d)RNA15-mer version of wild-type SpA, which was truncated (t) at the 5′ end of the gRNA sequence (tSpA dgRNA, see Table 10); tSpA dRNP). RNP comprised of dgRNA complexed to WT Cas9 is able to bind to sequence but does not cut genomic DNA homologous to the gRNA sequence. To determine the optimal ratio of dead RNP:WT RNP for the assay, tSpA dRNP:Sp37 WT RNP mixed at different ratios were Nucleofected™ into mPB CD34⁺ cells, keeping the total RNP concentration constant at 3.75 μM.

TABLE 10
List of selected guide RNAs and dead guide
RNAs

| gRNA* | Targeting | Targeting | |
|---|---|---|---|
| or | domain | domain | |
| dgRNA | sequence | sequence | |
| ID | (RNA) | (DNA) | Sense |
| Sp35 | CUUGUCAAGGCUAUUG | CTTGTCAAGGCTATTG | Anti- |
| gRNA | GUCA | GTCA | sense |
| | (SEQ ID NO: 339) | (SEQ ID NO: 917) | |
| Sp37 | CUUGACCAAUAGCCUU | CTTGACCAATAGCCTT | Sense |
| gRNA | GACA | GACA | |
| | (SEQ ID NO: 333) | (SEQ ID NO: 915) | |
| SpA | GGCAAGGCUGGCCAAC | GGCAAGGCTGGCCAAC | Sense |
| gRNA | CCAU | CCAT | |
| | (SEQ ID NO: 340) | (SEQ ID NO: 919) | |
| tSpA | GGCUGGCCAACCCAU | GGCTGGCCAACCCAT | Sense |
| dgRNA | (SEQ ID NO: 970) | (SEQ ID NO: 971) | |
| Sp180 | GCCGGCGGCUGGCUA | GCCGGCGGCTGGCTA | |
| dgRNA | (SEQ ID NO: 972) | (SEQ ID NO: 973) | |
| Sp181 | AGUGAGGCCAGGGGC | AGTGAGGCCAGGGGC | |
| dgRNA | (SEQ ID NO: 974) | (SEQ ID NO: 975) | |
| Sp182 | UUAGAGUAUCCAGUG | TTAGAGTATCCAGTG | |
| dgRNA | (SEQ ID NO: 976) | (SEQ ID NO: 977) | |

*None of the guide RNAs or dead guide RNAs in Table 10 and used in the experiments of Example 8 are modified to recruit an exogenous trans-acting factor.

[0281] tSpA dRNP co-delivered with Sp37 WT RNP at a ratio of 1:4 (dRNP:Total RNP ratio 1:5; 0.75 μM dRNP:3.75 μM Total RNP) supported a ˜4.3-fold increase in indels (as determined by T7E1 endonuclease analysis of HBG2 PCR product amplified from gDNA extracted from CD34⁺ cells) compared to CD34⁺ cells treated with 3.75 μM live Sp37 WT RNP alone (FIG. 17). These data show that dRNP paired with WT RNP can increase editing at a target in adult CD34⁺ cells.

[0282] To determine whether co-delivery of dead RNP would increase editing of HBG target site, Sp181 dRNP (comprising Sp181 dgRNA (Table 10)) and tSpA dRNP (comprising tSpA dgRNA (Table 10) targeting the same strand of Sp35) were co-delivered with Sp35 by Maxcyte electroporation into mPB CD34⁺ cells.

[0283] Electroporation of Sp35 WT RNP (3.75 μM) alone does not support detectable indels (by T7E1 endonuclease analysis) (FIG. 18). However, co-delivery of Sp35 WT RNP (3 μM) with either dRNP (Sp181 dRNP and tSpA dRNP) (Sp181 dgRNA (Table 10) or tSpA dgRNA (Table 10), at 0.75 μM) increased indels from 0% to 10% compared to CD34⁺ cells electroporated with Sp35 WT RNP alone (by T7E1 endonuclease analysis) (FIG. 18). Importantly, the level of indels detected in the mPB CD34⁺ cells was maintained in the day 7 erythroid progeny of edited cells (FIG. 18, white bars).

[0284] Additional dead/WT pairs of RNPs were tested to determine the effect of co-delivery of dead/WT RNPs on editing the target site in the HBG promoter (−110 nt) and resulting expression of HbF. Dead/WT pairs of RNPs (as shown in Table 11) were co-delivered by electroporation into mPB CD34⁺ cells. dRNP was codelivered with WT RNP (i.e., Sp35 gRNA+tSpA dgRNA, Sp35 gRNA+Sp181 dgRNA, and Sp37 gRNA+tSpA dgRNA) at a ratio of 1:4 (dRNP:Total RNP ratio 1:5; 0.75 μM dRNP:3.75 μM Total RNP).

TABLE 11
Percentage Editing and HbF Production by Co-Delivery of RNPs

| | | | % Editing | |
|---|---|---|---|---|
| gRNA Pairs | RNPs | Strategy | (T7E1) | % HbF |
| Sp37 gRNA + | Sp37 D10A RNP + | D10A* | 22.44 | 11.2 |
| SpA gRNA | SpA D10A RNP | | | |
| Sp85 gRNA + | Sp85 D10A RNP + | D10A | 10.5 | 5 |
| SpA gRNA | SpA D10A RNP | | | |
| Sp36 gRNA + | Sp36 D10A RNP + | D10A | 5 | 5.3 |
| Sp85 gRNA | Sp85 D10A RNP | | | |
| Sp35 gRNA + | Sp35 WT RNP + | WT | 10 | 9.6 |
| tSpA dgRNA | tSpA dRNP | Live/Dead | | |
| Sp35 gRNA + | Sp35 WT RNP + | WT | 8.27 | 12.71 |
| Sp181 dgRNA | Sp181 dRNP | Live/Dead | | |
| Sp37 gRNA + | Sp37 WT RNP + | WT | 33.66 | 13.48 |
| tSpA dgRNA | tSpA dRNP | Live/Dead | | |

*= D10A is a Cas9 nickase that makes a single strand nick.

[0285] tSpA dRNP co-delivered with Sp35 WT RNP, Sp181 dRNP co-delivered with Sp35 WT RNP, and tSpA dRNP co-delivered with Sp37 WT RNP supported editing of the HBG promoter (as determined by T7E1 endonuclease analysis of HBG2 PCR product amplified from gDNA extracted from CD34⁺ cells) and resulted in induction of HbF protein (as determined by HPLC analysis of hemoglobin expression in erythroid progeny according to the HPLC method described in Chang 2017 at pp. 143-44 and/or UPLC analysis, incorporated by reference herein) (Table 3). These data show that dRNP paired with WT RNP can support editing at a target region in adult CD34⁺ cells, resulting in HbF protein expression in erythroid progeny of the edited adult CD34⁺ cells.

### Example 9: Tracking Edited HSC Contribution to Hematopoiesis Based on Tracking Edited Alleles in their Progeny In Vivo

[0286] DNA lesions created by paired Cas9 WT and nickases (such as the D10A and N863A mutants) can lead to a variety of repair outcomes, including a wide spectrum of insertions and deletions in the region proximal to the nicks (Bothmer 2017). However, in contrast to wild-type Cas9, the repair outcomes induced by paired nickases are more diverse and have a more uniform distribution of frequencies of specific indels (Bothmer 2017).

[0287] The diverse repair outcomes obtained after repair of double strand breaks made by WT CRISPR nucleases or after paired nicking can then be used to estimate the diversity of edited HSCs that are contributing to blood production. This is important because for life-long hematopoiesis from an edited cell pool, multiple edited HSCs must retain their ability to produce blood and self-renew for a human life span. For a specific target site, editing using a CRISPR with a gRNA that has specificity for one target site in the genome suggests that only one site will be modified, presenting the challenge of distinguishing edited alleles among the many HSCs, and thus hard to determine whether multiple HSCs are contributing to hematopoiesis. However, this presents a unique advantage to tracking the edited cells based on subtle differences in DNA repair outcomes that can occur within each allele and in each cell. The unique alleles are distinguished from each other based on indel characteristics including the type and size of the edit (insertion, deletion, insertion/deletion, and number of nucleotides deleted or inserted) and on their relative distance to the cut site and within the amplicon. For example, each deletion or insertion observed when sequencing the cell population can be characterized by its position in the genome, its length, and in the case of insertions, its sequence. The combination of these features can be used as an indel barcode to track the persistence of HSCs and their differentiation into mature blood cells as a measure of diversity after editing (FIG. 19). Importantly, unlike in other CRISPR indel barcoding approaches or in contrast to gene therapy approaches, the indel barcode is a potentially functional edit at the target locus, requiring no further modification of the genome for purposes of tracking. Although it is possible for different cells to be independently edited in a way that creates the same edit, tracking by indel barcodes can establish a lower bound on the diversity of a population. Because each allele in a diploid cell can receive a different indel, that possibility must also be accounted for in diversity estimates.

[0288] It is hypothesized that if multiple unique indels in hematopoietic stem cells (HSCs) and progeny are detected then edited HSC diversity is maintained after editing. A method of tracking unique edited alleles to determine whether HSC diversity is maintained is disclosed herein. First, an RNA-guided nuclease and guide RNA complexed to form a ribonucleoprotein (RNP) complex for editing is electroporated into cells and several CD34+ cells repair the DNA slightly differently to create unique alleles. Over time after transplantation into an animal, edited HSCs repopulate the blood system and can be collected and sorted based on the different tissues and lineages to evaluate specific unique indels in the long-term engrafted HSCs and in differentiated progeny.

[0289] An HBB locus was used as a model to illustrate this method and determine whether HSC diversity is maintained. CD34+ cells were electroporated with D10A nickase RNPs targeting the HBB locus as described using the methods for electroporation provided in Example 1. Before transplantation, genomic DNA was harvested from an aliquot of the bulk pre-infusion CD34⁺ cell product, sequenced, and reads aligned to a reference sequence encompassing the target site at the HBB locus. The remainder (majority bulk) of the CD34⁺ cells were transplanted into mice. Four months after transplantation, human cells were purified from the hematopoietic organs of the mice (peripheral blood [PB], spleen, and bone marrow [BM]) and the human cell lineages (myeloid, erythroid, lymphoid, CD34⁺ or HSCs) were further purified. The genomic DNA was isolated from all of these human cells derived from the engrafted edited HSCs and sequenced (sequencing reads were aligned to the reference locus). The percentage of each unique edited allele over the total sum of all edited alleles detected was plotted to determine their relative contribution (FIG. 20). The black bars represent a group of all unique alleles occurring at low frequencies of total edited alleles. White and grey bars correspond to the top five most abundant unique alleles ranked (FIG. 20). In the bulk CD34⁺ cell preinfusion product, the top five most abundant clones together make up less than 10% of total edited alleles, consistent with the diversity and heterogeneity of cell types within the bulk CD34⁺ cell population. There are many unique alleles at less than 1% each grouped into the black bar. An analysis of the top five most abundant alleles in mouse 1 (that is, in vivo after transplantation of and long-term engraftment of edited HSCs derived from the heterogeneous preinfusion product) indicates that there are shared unique HSC alleles across tissues and in different lineages (FIG. 21). An analysis of the top 5 most abundant clones in mouse 2 indicates that, for the most part, different unique alleles are present in vivo compared to mouse 1, but there are also shared alleles across tissues and lineages (FIG. 21). These data show that multiple edited HSCs are making blood in vivo and that a repertoire of unique edits are detected across multiple tissues. This demonstrates that there is diversity among the alleles and that no one edited allele is dominant over others. This method provides a means to survey for any unintended effects of alleles at the target site providing a readout on safety of editing. The method also allows tracking of indel diversity over time, which may provide information about the toxicity of a transplanted cell population according to this disclosure, as well as about the efficacy of such transplanted cell population.

### Example 10: Lentiviral Screen of Guide RNAs Influencing Fetal Hemoglobin Expression

[0290] A library of approximately 25,000 unique gRNA sequences spanning the beta globin locus (FIG. 22) was screened to identify cis-regulatory elements involved in the regulation of fetal hemoglobin expression. An immortalized human erythroid progenitor cell line (HUDEP-2, Kurita 2013) was transduced with Cas9 Blasticidin Lentiviral Transduction Particles (Sigma-Aldrich, St. Louis, MO) to generate a cell line that stably expressed S. pyogenes Cas9. A guide RNA library comprising the ˜25,000 unique sequences described above, along with 500 non-homologous guide sequences, was designed and packaged in lentiviral vectors as described in Joung 2017. A portion of the lentiviral genome encoding the unique guide RNA sequences is shown below:

(SEQ ID NO: 1661)
AATGATACGG CGACCACCGA GATCTACACT CTTTCCCTAC
ACGACGCTCT TCCGATCTTA CGATCGATGG TCCAGAGCTT
TATATATCTT GTGGAAAGGA CGAAACACCN NNNNNNNNNN
NNNNNNNNNG TTTTAGAGCT AGAAATAGCA AGTTAAAATA
AGGCTAGTCC GTTATCAACT TGAAAAAGTG GCACCGAGTC
GGAGATCGGA AGAGCACACG TCTGAACTCC AGTCACCAAG
GCGAATCTCG TATGCCGTCT TCTGCTTG

(Xs denote a unique 20-mer gRNA targeting sequence; primer binding sequences are underlined.). The lentiviral vectors also encoded puromycin, allowing for the selection of transduced cells carrying the guide RNA expression cassettes.

[0291] HUDEP-2 cells were transduced with lentiviral particles encoding the guide RNA library over a range of concentrations and treated with puromycin to determine the viral titer (transducing unit per mL of vector). After the viral titer was determined, lentiviral particles encoding the guide RNA library were applied to S. pyogenes Cas9-expressing HUDEP-2 cells at a multiplicity of infection of 0.25 to ensure that most cells would have integrated no more than one copy of the lentiviral genome and thus would express a unique guide RNA. The total number of cells transduced was calculated to ensure that an average of more than 500 cells carried a copy of each guide RNA in the library. Following transduction, the transduced cells were selected using puromycin, expanded and differentiated to become hemoglobinized erythroblasts. The cells were then fixed, permeablized, and stained using a Fluorescein isothiocyanate conjugated antibody against gamma-globin chains (Thorpe 1994) and flow sorted into pools that expressed high or low levels of gamma globin (Canvers 2015) using a SONY cell sorter. Genomic DNA was harvested from both pools and the portion of the lentiviral transgene encoding the guide RNA sequence was PCR amplified and sequenced using next generation sequencing. Transduction, selection, differentiation, sorting and sequencing were repeated across four bioreplicates.

[0292] Guide RNA sequences listed in Table 12, below, (a) were identified as enriched in High-F populations relative to the non-targeting controls, and (b) did not have a perfectly matched cut site located within or proximal to the HBB or HBD genes. The gRNAs were ranked and categorized into five tiers based for prioritization of validation in mPB CD34+ cells (“Tier 1”, “Tier 2”, “Tier 3”, “Tier 4” and “Friend of Tier 1”). Division into four tiers was based on Standard deviation (SD of log 2 enrichment across 4 bioreplicates), Log 2 Enrichment score (average log 2 enrichment across the 4 bioreplicates), and whether the guide RNA was specific to HBG1 and/or specific to HBG2. Log 2 enrichment values for each replicate are calculated as follows:

$$log 2 ( \frac{gRNA read frequency in High HbF pool from Replicate}{gRNA read frequency in Low HbF pool from Replicate} ) .$$

[0293] Guide RNAs of the highest priority were those in Tier 1, which was defined as SD<=0.75, Log 2 Enrichment score >=1.6 or >=1.3 if the guide RNA was specific to either HBG1 or HBG2. Tier 2 was defined as SD<=0.75, Log 2 Enrichment score >=1. Tier 3 was defined as SD<=1, Log 2 Enrichment score >=0.7. Tier 4 was defined as SD<=1.5, Log 2 Enrichment score >=0.5. Friend of Tier 1 was defined as those guide RNAs whose cut site was within 10 nucleotides of a Tier 1 cut site, but were not captured in Tiers 2 to 4 (FIG. 23).

[0294] Analysis of targeting domains enriched in the screen revealed several regions of interest in which enriched guide RNA cut sites were concentrated. The majority of the HbF inducing gRNAs were mapped to the beta globin locus including HBG, HBD, and HBB (FIG. 24). Those regions thus enclose regulatory elements that repress HbF expression. gRNA cutting in those regions are likely to induce HbF expression in erythroid cells. gRNAs whose cut-site overlap with HbF regulatory element within those region are likely to yield the highest frequency of HbF inducing indels and thus the highest frequency of high-HbF expressing cells post-editing. These regions of interest are shown in Table 13, below:

TABLE 13
Regions of interest

| Genomic | | |
|---|---|---|
| Coordinate of | | |
| HbG* | Nucleotides | Name of Region |
| Chr 11 | TCCTAAAGCT TGGAACACTT | Region 1: Downstream of HBG1 |
| (NC_000011.10): | TCCCTTCCTT AAGAACCATC | |
| 5,247,883- | CTTGCTACTC AGCTGCAATC | |
| 5,248,186 | AATCCAGCCC CCAGGTCTTC | |
| | ACTGAACCTT TTCCCATCTC | |
| | TTCCAAAACA TCTGTTTCTG | |
| | AGAAGTCCTG TCCTATAGAG | |
| | GTCTTTCTTC CCACCGGATT | |
| | TCTCCTACAC CATTTACTCC | |
| | CACTTGCAGA ACTCCCGTGT | |
| | ACAAGTGTCT TTACTGCTTT | |
| | TATTTGCTCA TCAAAATGCA | |
| | CATCTCATAT AAAAATAAAT | |
| | GAGGAGCATG CACACACCAC | |
| | AAACACAAAC AGGCATGCAG | |
| | AAAT (SEQ ID NO: 1640) | |
| Chr 11 | ATAAAGATGA ACCCATAGTG | Region 2: HBG1 Intron 2 - A |
| (NC_000011.10): | AGCTGAGAGC TCCAGCCTGG | |
| 5,248,509- | CCTCCAGATA ACTACACACC | |
| 5,249,173 | AAGCTTCCAC CCAGAATCAA | |
| | GCCTATGTTA ACTTCCCTCA | |
| | AAGCCTGAGA TTTTGCCTTC | |
| | CCATTAAATG CAGGTAGTTG | |
| | TTCCCCTTCA AGCACTAGTC | |
| | ACTGGCCATA ATTTAAATCT | |
| | TGCTATCTTC TTGCCACCAT | |
| | GAACCCTGTA TGTTGTAGGC | |
| | TGAAGACGTT AAAAGAAACA | |
| | CACGCTGACA CACACACACA | |
| | CACGCGCGCG CGCACACACA | |
| | CACACACACA CAGAGCTGAC | |
| | TTTCAAAATC TACTCCAGCC | |
| | CAAATGTTTC AATTGTTCCT | |
| | CACCCCTGGA CATACTTTGC | |
| | CCCCATCTGG AATTAAAGGA | |
| | TATAAGTTTG TAATGAAGCA | |
| | TTAGCAGCAT TTTATATGTG | |
| | TCCAGCTGAT ATAGGAATAG | |
| | CCTTAGCAAT GTATGTTTGG | |
| | CCACCAAAGT TCCCCACTTT | |
| | GACTGAGCCA ATATATGCCT | |
| | TCTGCCTGCA TCTTTTTAAC | |
| | GACCATACTT GTCCTGCCTC | |
| | CAGATAGATG TTTTAAAACA | |
| | ACAAAAATGA GGGAAAGATG | |
| | AAAGTTCTTT CTACTGGAAT | |
| | CTAATAAAGA AAAGTCATTT | |
| | TCCTCATTTC CACCTCTCTT | |
| | TTCTCAAAGT CAAAATTGTC | |
| | CATCT (SEQ ID NO: 1641) | |
| Chr 11 | CCCTAAAACA TTACCACTGG | Region 3: HBG1 Intron 2 - B |
| (NC_000011.10): | GTCTCAGCCC AGTTAGTCCT | |
| 5,249,198- | CTGCAGTTTC TTCACCCCCA | |
| 5,249,362 | ACCCCAGTAT CTTCAAACAG | |
| | CTCACACCCT GCTGTGCTCA | |
| | GATCAATACT CCGTTGTCTA | |
| | AGTTGCCTCG AGACTAAAGG | |
| | CAACAGGGCT GAAACATCTC | |
| | CTGGA (SEQ ID NO: 1642) | |
| Chr 11 | CTGTGAGATT GACAAGAACA | Region 4: HBG1 Intron 1 |
| (NC_000011.10): | GTTTGACAGT CAGAAGGTGC | |
| 5,249,591- | CACAAATCCT GAGAAGCGAC | |
| 5,249,712 | CTGGACTTTT GCCAGGCACA | |
| | GGGTCCTTCC TTCCCTCCCT | |
| | TGTCCTGGTC ACCAGAGCCT AC | |
| | (SEQ ID NO: 1643) | |
| Chr 11 | GCCGCCGGCC CCTGGCCTCA | Region 5: HBG1 -60 nt region |
| (NC_000011.10): | CTGG (SEQ ID NO: 1644) | from Transcription Start Site |
| 5,249,904- | | (TSS) |
| 5,249,927 | | |
| Chr 11 | CCTTGTCAAG GCTATTGGTC | Region 6: HBG1 -110 nt region |
| (NC_000011.10): | AAGGCAAGGC TGG (SEQ ID | from TSS |
| 5,249,955- | NO: 1645) | |
| 5,249,987 | | |
| Chr 11 | TGAGATAGTG TGGGGAAGGG | Region 7: HBG1 -200 nt region |
| (NC_000011.10): | GCCCCC AAGAGGATAC (SEQ ID | from TSS |
| 5,250,040- | NO: 1646) | |
| 5,250,075 | | |
| Chr 11 | TATAGCCTTT GCCTTGTTCC | Region 8: HBG1 -250 nt region |
| (NC_000011.10): | GATTCAGTCA TTCCAGTTTT T | from TSS |
| 5,250,089- | (SEQ ID NO: 1647) | |
| 5,250,129 | | |
| Chr 11 | TCTTCCCTTT AGCTAGTTTC | Region 9: HBG1 -333 nt region |
| (NC_000011.10): | CTTCTCCCAT CATAGAGGAT | from TSS |
| 5,250,141- | ACCAGGACTT CTTTTGTCAG | |
| 5,250,254 | CCGTTTTTTA CCTTCTTGTC | |
| | TCTAGCTCCA GTGAGGCCTG | |
| | TAGTTTAAAG CTAA (SEQ ID | |
| | NO: 1648) | |
| Chr 11 | CCACAGTTTC AGCGCAGTAA | Region 10: HBGI -650 nt region |
| (NC_000011.10): | TAGATTAGTG TTACATAATA | from TSS |
| 5,250,464- | TAAGACCTAA TGCTTACCTC | |
| 5,250,549 | AATATCTACT TATCCGTACC | |
| | TATTTG (SEQ ID NO: 1649) | |
| Chr 11 | TATTCAGGTA TGTATGTATA | Region 11: HBG1 -800 nt region |
| (NC_000011.10): | CACCAGATGA TGTGTATTTA | from TSS |
| 5,250,594- | CCACTGGATA AGTGTGTGTG | |
| 5,250,735 | CTGGCTGATG ACCCAGGGTT | |
| | TTGGCGTAGC TCTTCTATGC | |
| | TCAGTAAAGA TGATGGTAGA | |
| | ATGTTCTTTG GCAGGTACTG TG | |
| | (SEQ ID NO: 1650) | |
| Chr 11 | CAATAAAGAT GAACCCATAG | Region 12: HBG2 Intron 2 - A |
| (NC_000011.10): | TGAGCTGAGA GCTCCAGCCT | |
| 5,253,425- | GGCCTCCAGA TAACTACACA | |
| 5,254,121 | CCAAGCTTCC ACCCAGAATC | |
| | AAGCCTATGT TAACTTCCCT | |
| | CAAAGCCTGA GATTTTGCTT | |
| | TCCCATTAAA TGCAGGTAGT | |
| | TGTTCTTCTT GCAGCACTAG | |
| | TCACTGGCCA TAATTTAAAT | |
| | CTTGTTATCT TCTTGCCACC | |
| | ATGAACCCTG TATGCTGTAG | |
| | GCTGAAAACG TTAAAAGAAA | |
| | CACACGCTCT CACACACACA | |
| | CAAACACACG CGCGCACACA | |
| | CACACACACA CACACAGAGC | |
| | TGACTTTCAA AATCTACTCC | |
| | AGCCCAAATG TTTCAATTGT | |
| | TCCTCACCCC TGGACATACT | |
| | TTGCCCCCAT CTGGAATTAA | |
| | AGGATATAAG TTTGTAATGA | |
| | AGCATTAGCA GCATTTTATA | |
| | TGTGTCCAGC TGATATAGGA | |
| | ATAGCCTTAG CAATGTATGT | |
| | TTGGCCACCA AAGTTCCCCA | |
| | CTTTGACTGA GCCAATATAT | |
| | GCCTTCTGCC TGCATCTTTT | |
| | TAATGACCAT ACTTGTCCTG | |
| | CCTCCAGATA GATGTTTTAA | |
| | AACGAATAAC AAAAATAGGG | |
| | GAAAGGTGAA AGTTCTTTCT | |
| | ACCGAAATCT AATAAAGAAA | |
| | AGTCATTTTC CTCATTTCCA | |
| | CCTCTCTTTT CTCAAAGTCA | |
| | AAGTTGTCCA TCTAGATTTT | |
| | CAGAGGCACT CCTTAGG (SEQ ID | |
| | NO: 1651) | |
| Chr 11 | CCCTAAAACA TTGCCACTGG | Region 13: HBG2 Intron 2 - B |
| (NC_000011.10): | GTCTCAGCCC AGTTAGTCCT | |
| 5,254,122 - | CTGCAGTTTC TTCACTCCCA | |
| 5,254,306 | ACCCCAGTAT CTTCAAACAG | |
| | CTCACACCCT GCTGTGCTCA | |
| | GATCAATACT CAGTTGTCTA | |
| | AGTTGCCTCG AGACTAAAGG | |
| | CAACAGTGCT GAAACATCTC | |
| | CTGGACTCAC CTTGAAGTTC | |
| | TCAGG (SEQ ID NO: 1652) | |
| Chr 11 | AGCCTGTGAG ATTGACAAGA | Region 14: HBG2 Intron 1 |
| (NC_000011.10): | ACAGTTTGAC AGTCAGAAGG | |
| 5,254,511- | TGCCACAAAT CCTGAGAAGC | |
| 5,254,648 | GACCTGGACT TTTGCCAGGC | |
| | ACAGGGTCCT TCCTTCCCTC | |
| | CCTTGTCCTG GTCACCAGAG | |
| | CCTACCTTCC CAGGGTT (SEQ ID | |
| | NO: 1653) | |
| Chr 11 | CCGCCGGCCC CTGGCCTCAC | Region 15: HBG2 -60 nt region |
| (NC_000011.10): | TGGATACTCT AAGACTAT (SEQ | from TSS |
| 5,254,829- | ID NO: 1654) | |
| 5,254,866 | | |
| Chr 11 | CCTTGTCAAG GCTATTGGTC | Region 16: HBG2 -110 nt region |
| (NC_000011.10): | AAGGCAAGGC T | from TSS |
| 5,254,879- | (SEQ ID NO: 1655) | |
| 5,254,909 | | |
| Chr 11 | CAGGGACCGT TTCAGACAGA | Region 17: HBG2 -200 nt region |
| (NC_000011.10): | TATTTGCATT GAGATAGTGT | from TSS |
| 5,254,935 | GGGGAAGGGG CCCCCAAGAG | |
| 5,255,009 | GATACTGCTG CTTAA (SEQ ID | |
| | NO: 1656) | |
| Chr 11 | TTGCCTTGTT CCGATTCAGT | Region 18: HBG2 -250 nt region |
| (NC_000011.10): | CATTCCAAT (SEQ ID NO: | from TSS |
| 5,255,025- | 1657) | |
| 5,255,053 | | |
| Chr 11 | TTTAGCTAGT TTTCTTCTCC | Region 19: HBG2 -330 nt region |
| (NC_000011.10): | CACCATAGAA GATACCAGGA | from TSS |
| 5,255,076- | CTTCTTTTGT CAGCCGTTTT | |
| 5,255,179 | TCACCTTCTT GTCTGTAGCT | |
| | CCAGTGAGGC CTGTAGTTTA | |
| | AAGT (SEQ ID NO: 1658) | |
| Chr 11 | GGACACGTCT TAGTCTCATT | Region 20: HBG2 -500 nt region |
| (NC_000011.10): | TAGTAAGCAT TGGTTTCC (SEQ | from TSS |
| 5,255,255- | ID NO: 1659) | |
| 5,255,292 | | |
| Chr 11 | TTTTTTATAT TCAGGTATGT | Region 21: HBG2 -800 nt region |
| (NC_000011.10): | ATGTAGGCAC CCGATGATGT | from TSS |
| 5,255,518- | GTATTTATCA CTGGATAAGT | |
| 5,255,641 | GTATGTGCTG GCTGATGACC | |
| | CAGGGTTTTG GTGTAGCTCT | |
| | TCTATGCTCG GTAAAGATGA | |
| | TGGT (SEQ ID NO: 1660) | |

*NCBI Reference Sequence NC_000011, “Homo sapiens chromosome 11, GRCh38.p12 Primary Assembly,” (Version NC_000011.10). All coordinates are Hg38 0-based.

[0295] HUDEP-2 cells were individually electroporated with RNPs complexed with the gRNAs listed in Table 12 and S. pyogenes Cas9 protein at a concentration of 5 μM. After electroporation, HUDEP-2 cells were pooled (2 replicate per pool) as detailed in Table 14. The pooling of electroporated samples was perform based on the cut-site position of the included RNPs to allow for PCR amplification and NGS analysis of each pool with a single primer pair per pool. Each pool of cell was differentiated in erythroid cells, and sorted based on gamma globin expression in a “high HbF” fraction and a “low HbF” fraction. Genomic DNA from sorted populations was prepared, PCR amplified, and sequenced. The amount of gDNA to be amplified and amount of PCR product to be sequenced was adjusted for each pool based on the number of individual electroporated samples (corresponding to the number of gRNAs tested) initially pooled. Sequence reads were mapped to the reference amplicon sequence of the human genome (Hg38) to identify insertions or deletions (indels) (>35 million total aligned reads). Frequencies of individual indels were calculated and indels with average frequencies across samples that were below a cut-off adjusted for each pool were eliminated from further analysis (cutoff: 0.1/[number of electroporation sample included in the pool]). Average HbF enrichment scores of individual indels were calculated (as average of

$$log 2 ( \frac{indel read - frequency in High HbF pool from Replicate}{indel read - frequency in Low HbF pool from Replicate} )$$

across each bioreplicate) and their position was determined relative to either HBG1 (FIG. 25A) or HBG2 (FIG. 25B). When the sequence homology between the HBG1 and HBG2 locus did not allow differentiation of reads originating from one or the other, the indels are displayed with both potential coordinates on FIG. 25A and FIG. 25B. Multiple clusters of fetal globin inducing indels were identified in HUDEP-2 cells, likely overlapping with HBG repressing elements.

TABLE 14
Pool of electroporated samples, list of gRNA
included in each pool.

| Pool | gRNA targeting domain (DNA) |
|---|---|
| Pool 1 | CTTCCTTCCCTCCCTTGTCC (SEQ ID NO: 1084) |
| | CAGGACAAGGGAGGGAAGGA (SEQ ID NO: 1311) |
| | TAGTCTTAGAGTATCCAGTG (SEQ ID NO: 982) |
| | CTGGTGACCAGGACAAGGGA (SEQ ID NO: 983) |
| | TCTGGTGACCAGGACAAGGG (SEQ ID NO: 984) |
| | GGCTCTGGTGACCAGGACAA (SEQ ID NO: 1035) |
| | AGGCTCTGGTGACCAGGACA (SEQ ID NO: 1312) |
| | GAAGGTAGGCTCTGGTGACC (SEQ ID NO: 1233) |
| | AACCCTGGGAAGGTAGGCTC (SEQ ID NO: 1085) |
| | CGAGTGTGTGGAACTGCTGA (SEQ ID NO: 1036) |
| | GAGTGTGTGGAACTGCTGAA (SEQ ID NO: 1234) |
| | CCTAGCCAGCCGCCGGCCCC (SEQ ID NO: 1314) |
| | TGAGGCCAGGGGCCGGCGGC (SEQ ID NO: 1313) |
| | CCGCCGGCCCCTGGCCTCAC (SEQ ID NO: 1316) |
| | CCAGTGAGGCCAGGGGCCGG (SEQ ID NO: 1037) |
| | TATCCAGTGAGGCCAGGGGC (SEQ ID NO: 1086) |
| | AGAGTATCCAGTGAGGCCAG (SEQ ID NO: 985) |
| | TAGAGTATCCAGTGAGGCCA (SEQ ID NO: 1315) |
| | TTAGAGTATCCAGTGAGGCC (SEQ ID NO: 1235) |
| | TAGTCTTAGAGTATCCAGTG (SEQ ID NO: 986) |
| | TGGTCAAGTTTGCCTTGTCA (SEQ ID NO: 919) |
| | GTTTGCCTTGTCAAGGCTAT (SEQ ID NO: 913) |
| | CTTGTCAAGGCTATTGGTCA (SEQ ID NO: 917) |
| | CTTGACCAATAGCCTTGACA (SEQ ID NO: 915) |
| | CAAGGCTATTGGTCAAGGCA (SEQ ID NO: 911) |
| | GCTATTGGTCAAGGCAAGGC (SEQ ID NO: 1038) |
| Pool 2 | TATCTGTCTGAAACGGTCCC (SEQ ID NO: 1039) |
| | ATATTTGCATTGAGATAGTG (SEQ ID NO: 1317) |
| | TATTTGCATTGAGATAGTGT (SEQ ID NO: 945) |
| | ATTTGCATTGAGATAGTGTG (SEQ ID NO: 1318) |
| | GCATTGAGATAGTGTGGGGA (SEQ ID NO: 1040) |
| | CATTGAGATAGTGTGGGGAA (SEQ ID NO: 987) |
| | ATTGAGATAGTGTGGGGAAG (SEQ ID NO: 988) |
| | GTGGGGAAGGGGCCCCCAAG (SEQ ID NO: 1319) |
| | AAGCAGCAGTATCCTCTTGG (SEQ ID NO: 1001) |
| | TAAGCAGCAGTATCCTCTTG (SEQ ID NO: 1049) |
| | TTAAGCAGCAGTATCCTCTT (SEQ ID NO: 1326) |
| | ATTAAGCAGCAGTATCCTCT (SEQ ID NO: 1327) |
| | ACTGAATCGGAACAAGGCAA (SEQ ID NO: 989) |
| | GGAATGACTGAATCGGAACA (SEQ ID NO: 990) |
| | AAAAACTGGAATGACTGAAT (SEQ ID NO: 1320) |
| | AAAAATTGGAATGACTGAAT (SEQ ID NO: 1328) |
| | GGAGAAGGAAACTAGCTAAA (SEQ ID NO: 1041) |
| | GGGAGAAGGAAACTAGCTAA (SEQ ID NO: 1087) |
| | GGGAGAAGAAAACTAGCTAA (SEQ ID NO: 1050) |
| | GTTTCCTTCTCCCATCATAG (SEQ ID NO: 1042) |
| | GTATCCTCTATGATGGGAGA (SEQ ID NO: 991) |
| | CTCCCATCATAGAGGATACC (SEQ ID NO: 1321) |
| | CTCCCACCATAGAAGATACC (SEQ ID NO: 1264) |
| | GTCCTGGTATCCTCTATGAT (SEQ ID NO: 1088) |
| | GTCCTGGTATCTTCTATGGT (SEQ ID NO: 1002) |
| | AGTCCTGGTATCCTCTATGA (SEQ ID NO: 1043) |
| | AGTCCTGGTATCTTCTATGG (SEQ ID NO: 1003) |
| | AGAAGTCCTGGTATCTTCTA (SEQ ID NO: 1263) |
| | ACGGCTGACAAAAGAAGTCC (SEQ ID NO: 992) |
| | AGAGACAAGAAGGTAAAAAA (SEQ ID NO: 1089) |
| | ACAGACAAGAAGGTGAAAAA (SEQ ID NO: 1051) |
| | CACTGGAGCTAGAGACAAGA (SEQ ID NO: 1090) |
| | TCTTGTCTCTAGCTCCAGTG (SEQ ID NO: 1091) |
| | TCTTGTCTGTAGCTCCAGTG (SEQ ID NO: 1118) |
| | CTTTAAACTACAGGCCTCAC (SEQ ID NO: 1092) |
| Pool 3 | CTATTACTGCGCTGAAACTG (SEQ ID NO: 1044) |
| | TAGATATTGAGGTAAGCATT (SEQ ID NO: 1236) |
| | GTACGGATAAGTAGATATTG (SEQ ID NO: 1045) |
| | TATACATACATACCTGAATA (SEQ ID NO: 1237) |
| | AGATGATGTGTATTTACCAC (SEQ ID NO: 1322) |
| | AGTGGTAAATACACATCATC (SEQ ID NO: 1094) |
| | CAGCACACACACTTATCCAG (SEQ ID NO: 993) |
| | TGTGTGCTGGCTGATGACCC (SEQ ID NO: 994) |
| | GTGTGCTGGCTGATGACCCA (SEQ ID NO: 995) |
| | TGGCTGATGACCCAGGGTTT (SEQ ID NO: 1323) |
| | AAGAGCTACGCCAAAACCCT (SEQ ID NO: 996) |
| | GAAGAGCTACGCCAAAACCC (SEQ ID NO: 997) |
| | TCTATGCTCAGTAAAGATGA (SEQ ID NO: 998) |
| | ATGTTCTTTGGCAGGTACTG (SEQ ID NO: 1238) |
| | AATGCTAGGTTCACTTCTCA (SEQ ID NO: 1239) |
| | CATGGAAAACAACTCTAAAG (SEQ ID NO: 1095) |
| | AAACAACTCTAAAGAGGCAA (SEQ ID NO: 1096) |
| Pool 4 | AATGAGAACTTAAGAGATAA (SEQ ID NO: 1266) |
| | TAAAGCAACAGTTTCAGTGC (SEQ ID NO: 1267) |
| | GATAAGTAGATATTGAAGTA (SEQ ID NO: 1268) |
| | TTATATTCAGGTATGTATGT (SEQ ID NO: 1119) |
| | AGTGATAAATACACATCATC (SEQ ID NO: 1269) |
| | CAGTGATAAATACACATCAT (SEQ ID NO: 1270) |
| | TATGTGCTGGCTGATGACCC (SEQ ID NO: 1004) |
| | ATGTGCTGGCTGATGACCCA (SEQ ID NO: 1005) |
| | TGGCTGATGACCCAGGGTTT (SEQ ID NO: 1323) |
| | AAGAGCTACACCAAAACCCT (SEQ ID NO: 1053) |
| | GAAGAGCTACACCAAAACCC (SEQ ID NO: 1006) |
| | TCTATGCTCGGTAAAGATGA (SEQ ID NO: 1007) |

[0296] To further identify which nucleotides of the genomic regions targeted by the gRNAs led to HbF induction, we quantified the number of “high HbF-enriched indels” (as defined by average enrichment score >1.75). Using the same cut-off when comparing replicate fraction <0.4% of indels were identified as enriched in one replicate over the other covering each position of the target regions within the human genome (FIG. 26). To achieve a fine analysis, all deletions spanning more than 10 nt were excluded from the analysis. The fraction of “enriched indels” covering each position over count of all covering indels (positions with less than 10 total covering indels were excluded from the analysis) was quantified. Each position for which 70% of the covering indels were characterized as “high HbF-enriched indels” are listed in Table 15.

TABLE 15
Genomic position whose disruption
by indels lead to HbF expression.

| Postion Start* | Position End* |
|---|---|
| 5249683 | 5249684 |
| 5249686 | 5249687 |
| 5249961 | 5249962 |
| 5249963 | 5249964 |
| 5249964 | 5249965 |
| 5249965 | 5249966 |
| 5249966 | 5249967 |
| 5249967 | 5249968 |
| 5249968 | 5249969 |
| 5249969 | 5249970 |
| 5249970 | 5249971 |
| 5249971 | 5249972 |
| 5249972 | 5249973 |
| 5249973 | 5249974 |
| 5249974 | 5249975 |
| 5249975 | 5249976 |
| 5250049 | 5250050 |
| 5250050 | 5250051 |
| 5250051 | 5250052 |
| 5250052 | 5250053 |
| 5250053 | 5250054 |
| 5250054 | 5250055 |
| 5250107 | 5250108 |
| 5250108 | 5250109 |
| 5250109 | 5250110 |
| 5250110 | 5250111 |
| 5250111 | 5250112 |
| 5250112 | 5250113 |
| 5250113 | 5250114 |
| 5250114 | 5250115 |
| 5250115 | 5250116 |
| 5250183 | 5250184 |
| 5250184 | 5250185 |
| 5250185 | 5250186 |
| 5250186 | 5250187 |
| 5250187 | 5250188 |
| 5250188 | 5250189 |
| 5250189 | 5250190 |
| 5254607 | 5254608 |
| 5254610 | 5254611 |
| 5254885 | 5254886 |
| 5254887 | 5254888 |
| 5254888 | 5254889 |
| 5254889 | 5254890 |
| 5254890 | 5254891 |
| 5254891 | 5254892 |
| 5254892 | 5254893 |
| 5254893 | 5254894 |
| 5254894 | 5254895 |
| 5254895 | 5254896 |
| 5254896 | 5254897 |
| 5254897 | 5254898 |
| 5254898 | 5254899 |
| 5254899 | 5254900 |
| 5254973 | 5254974 |
| 5254974 | 5254975 |
| 5254975 | 5254976 |
| 5254976 | 5254977 |
| 5254977 | 5254978 |
| 5254978 | 5254979 |
| 5255031 | 5255032 |
| 5255032 | 5255033 |
| 5255033 | 5255034 |
| 5255034 | 5255035 |
| 5255035 | 5255036 |
| 5255036 | 5255037 |
| 5255037 | 5255038 |
| 5255038 | 5255039 |
| 5255039 | 5255040 |
| 5255107 | 5255108 |
| 5255108 | 5255109 |
| 5255109 | 5255110 |
| 5255110 | 5255111 |
| 5255111 | 5255112 |
| 5255112 | 5255113 |
| 5255113 | 5255114 |
| 5255629 | 5255630 |
| 5255630 | 5255631 |
| 5255631 | 5255632 |
| 5255632 | 5255633 |
| 5255633 | 5255634 |
| 5255635 | 5255636 |

*NCBI Reference Sequence NC_000011, “Homo sapiens chromosome 11, GRCh38.p12 Primary Assembly,” (Version NC_000011.10). All coordinates are Hg38 0-based.

[0297] Since the analysis performed here is not exhaustive (the genomic position evaluated here is limited by the gRNAs used and the region covered by indels they generated), it is likely that other genomic positions also induce HbF expression, in particular genomic positions very close to the position listed in Table 15. The contiguous genomic positions identified in Table 15 (allowing for a gap of 2 nt) were joined to defined genomic regions within which disruption of one or multiple indels would lead to HbF expression in erythroid cells, listed in Table 16.

TABLE 16
Regions within which disruption of one or multiple
indels would lead to HbF expression in erythoid cells.
Genomic Coordinate of HbG Regions*

Chr 11 (NC_000011.10): 5249683-5249687
Chr 11 (NC_000011.10): 5249961-5249976
Chr 11 (NC_000011.10): 5250049-5250055
Chr 11 (NC_000011.10): 5250107-5250116
Chr 11 (NC_000011.10): 5250183-5250190
Chr 11 (NC_000011.10): 5254607-5254611
Chr 11 (NC_000011.10): 5254885-5254900
Chr 11 (NC_000011.10): 5254973-5254979
Chr 11 (NC_000011.10): 5255031-5255040
Chr 11 (NC_000011.10): 5255107-5255124
Chr 11 (NC_000011.10): 5255629-5255636
*NCBI Reference Sequence NC_000011, “Homo sapiens chromosome 11, GRCh38.p12 Primary Assembly,” (Version NC_000011.10). All coordinates are Hg38 0-based.

[0298] The coordinates of those domains very likely overlap closely with coordinates of HbF repressing motifs. It is expected than a gRNA targeting close or within those regions would lead to HbF expression. gRNAs whose cut site is within those coordinates would yield high frequency of high HbF expressing cells since most cells would carry HbF inducing indels.

[0299] HUDEP-2 cells were transfected with RNPs made with individual gRNAs listed in Table 12 complexed with S. pyogenes Cas9 protein at a concentration of 5 μM. After transfection, HUDEP-2 cells were differentiated and RNA was extracted from cell pellets using TaqMan® Gene Expression Cells-to-CT™ Kit from Life Technologies kit. HBG1 and RSP18 mRNA levels were then measured by qRT-PCR according to BioRad PrimePCR™ Probe Assay instructions and fold changes in HBG1 expression were calculated. When HBG1 expression fold changes were plotted against the HbF enrichment score from lentiviral-mediated screen, a positive correlation was seen (FIG. 27), demonstrating that HbF enrichment score based on lentiviral transduction is predictive of the HbF induction by RNP transfection.

[0300] Mobilized peripheral blood CD34+ cells were transfected with 4-8 M RNPs made by complexing S. pyogenes Cas9 protein with a subset of Tier 1 and Tier 2 single gRNAs from Table 12. CD34+ cells were differentiated into erythroid cells and lysed by repeated freeze-thaw in water. Cell lysates were cleared by centrifugation followed by filtration. Relative ratios of individual globin chains in the cell lysates were determined by reverse phase ultra performance liquid chromatography (Chang 2017). HbF level was calculated as ((Aγ-globin+ Gγ-globin)/(Aγ-globin+ Gγ-globin+β-globin) %). Increased HbF levels were observed as compared to mock transfected samples as provided in Table 17 demonstrating the disruption of repressive elements identified through lenti-mediated screen could lead to fetal globin induction in erythroid cells derived from primary human hematopoietic stem and progenitor cells.

TABLE 17
HbF Expression in Erythroid Progeny Derived
from Transfected mPB CD34+ Cells

| Name of | Targeting domain | | HbF level |
|---|---|---|---|
| gRNA | sequence (RNA) | Tier | (%) |
| No gRNA | — | — | 7.57 ± 2.36 |
| (Control) | | | |
| Sp35 | CUUGUCAAGGCUAUUGGUCA | 1 | 30.31 ± 1.33 |
| (SEQ ID | | | |
| NO: 339) | | | |
| #2 | GGAAUGACUGAAUCGGAACA | 1 | 19 |
| (SEQ ID | | | |
| NO: 294) | | | |
| #3 | GCAUUGAGAUAGUGUGGGGA | 2 | 22.50 ± 3.54 |
| (SEQ ID | | | |
| NO: 295) | | | |
| #4 | CAUUGAGAUAGUGUGGGGAA | 1 | 25.50 ± 2.12 |
| (SEQ ID | | | |
| NO: 332) | | | |
| #5 | AUUGAGAUAGUGUGGGGAAG | 1 | 33.70 ± 3.28 |
| (SEQ ID | | | |
| NO: 354) | | | |
| Sp36 | CAAGGCUAUUGGUCAAGGCA | 1 | 22.08 ± 6.82 |
| (SEQ ID | | | |
| NO: 338) | | | |

[0301] The experiment described above was repeated for gRNAs #3, #4 and #5, using guide RNAs synthesized from different vendors, RNP doses comprised within 4-16 M and gRNA to protein molar stoichiometry comprised within 2:1-4:1. Globin chain analysis in erythroid cells derived from electroporated mPB CD34+ cells demonstrated HbF levels reaching up to 42.80% in RNP treated samples versus 11.99% in mock treated samples (Table 18). Those results, showing clinically relevant levels of fetal hemoglobin expression, support the use of such gRNAs, complexed with S. pyogenes Cas9 protein, and electroporated into human HSPCs to provide a therapeutic cell population for the treatment of beta-hemoglobinopathies.

TABLE 18
Therapeutic levels of HbF Expression
in Erythroid Progeny Derived from
Transfected mPB CD34+ Cells

| Name of | Targeting domain | | HbF level |
|---|---|---|---|
| gRNA | sequence (RNA) | Tier | (%) |
| No gRNA | — | — | 11.99 ± 3.60 |
| (Control) | | | |
| #3 | GCAUUGAGAUAGUGUGGGGA | 2 | 41.23 ± 5.54 |
| (SEQ ID | | | |
| NO: 295) | | | |
| #4 | CAUUGAGAUAGUGUGGGGAA | 1 | 36.83 ± 1.44 |
| (SEQ ID | | | |
| NO: 332) | | | |
| #5 | AUUGAGAUAGUGUGGGGAAG | 1 | 42.80 ± 2.19 |
| (SEQ ID | | | |
| NO: 354) | | | |

### Example 11: Infusion of Edited mPB CD34+ Cells into NOD,B6.SCID Il2rγ−/− Kit(W41/W41) Mice Results in Long Term Engraftment and HbF Induction

[0302] To determine whether delivery of RNP #3 (comprising gRNA #3 targeting domain (SEQ ID NO:295, Table 18), complexed with S. pyogenes wildtype Cas9) achieves edits in long term repopulating hematopoietic stem cells, human adult CD34⁺ cells from mobilized peripheral blood (mPB) were infused into nonirradiated NOD,B6.SCID Il2rγ−/− Kit(W41/W41) (Jackson lab stock name: NOD.Cg-Kit<W-41J> Tyr<+> Prkdc<scid> Il2rg<tm1Wjl>/ThomJ) (“NBSGW”) mice. Briefly, 62.5×10⁶/mL mPB CD34+ cells were electroporated via MaxCyte electroporation with RNP #3 at a dose of 16 μM with a complexation ratio of 4:1 (gRNA:Cas9 protein) following 48 hours pre-stimulation in X-Vivo 10 media supplemented with SCF, TPO and FLT3. After 24 hours, mCD34+ cells were cryopreserved. One day later, mock-transfected (no gRNA added) or RNP #3-transfected mPB CD34+ cells were thawed and infused into NBSGW mice at 1 million cells per mouse via intravenous tail vein injection. Eight weeks later, mice were euthanized and bone marrow (BM) was collected from femurs, tibias, and pelvic bones. Human chimerism and lineage reconstitution (CD45+, CD15+, CD19+, glycophorin A (GlyA, CD235a+), lineage, and CD34+, and mouse CD45+ marker expression) in BM was determined by flow cytometry and analyzed. FIG. 28A depicts the frequency of individual populations in the BM. Human chimerism was defined as human CD45/(human CD45+mCD45). The frequency of GlyA+ cells was calculated as GlyA+ cells/total cells in BM. All other markers were calculated as marker+ cells/human CD45+ cells.

[0303] Similar chimerism and lineage distributions were achieved 8-weeks post-transplant by RNP #3-transfected mPB CD34+ cells compared to mock-transfected mPB CD34+ cells demonstrating that editing is comparable with retaining the engraftment potential of hematopoietic stem cells. FIG. 28B depicts the indels, as determined by next generation sequencing, of unfractionated BM, or flow-sorted individual populations. Approximately 80% of human alleles from the RNP-treated group were found to carry indels, suggesting hematopoietic stem cells were successfully edited. A similar indel frequency was observed across total unfractionated BM and individual lineages, suggesting that the editing at this site does not cause lineage skewing.

[0304] Lastly, long term HbF induction by RNP #3 edited CD235a+ (GlyA+) erythroid cells was analyzed. Briefly, unfractionated BM cells extracted from mice 8 weeks after infusion were placed in erythroid culture conditions for 18 days. FIG. 28C depicts the HbF expression, calculated as gamma/beta-like chains (%) by erythroid cells. Erythroid cells from mock-transfected group expressed approximately 21% HbF whereas those from RNP-treated group expressed approximately 42% HbF, significantly higher than mock-transfected group and potentially clinically relevant. These data demonstrate that robust long-term HbF induction is achieved by RNP #3 editing of human CD34+ cells.

### Example 12: Treatment of R-Hemoglobinopathy Using Edited Hematopoietic Stem Cells

[0305] The methods and genome editing systems disclosed herein may be used for the treatment of a β-hemoglobinopathy, such as sickle cell disease or beta-thalassemia, in a patient in need thereof. For example, genome editing may be performed on cells derived from the patient in an autologous procedure. Correction of the patient's cells ex-vivo and reintroduction of the cells into the patient may result in increased HbF expression and treatment of the β-hemoglobinopathy.

[0306] For example, HSCs may be extracted from the bone marrow of a patient with a β-hemoglobinopathy using techniques that are well-known to skilled artisans. The HSCs may be modified using methods disclosed herein for genome editing. For example, RNPs comprised of guide RNAs that target one or more regions in Table 13 complexed with an RNA-guided nuclease may be used to edit the HSCs. In certain embodiments, the gRNAs may be one or more gRNAs set forth in Table 12. In certain embodiments, modified HSCs have an increase in the frequency or level of an indel in the human HBG1 gene, HBG2 gene, or both, relative to unmodified HSCs. In certain embodiments, the modified HSCs can differentiate into erythroid cells that express an increased level of HbF. A population of the modified HSCs may be selected for reintroduction into the patient via transfusion or other methods known to skilled artisans. The population of modified HSCs for reintroduction may be selected based on, for example, increased HbF expression of the erythroid progeny of the modified HSCs or increased indel frequency of the modified HSCs. In some embodiments, any form of ablation prior to reintroduction of the cells may be used to enhance engraftment of the modified HSCs. In other embodiments, peripheral blood stem cells (PBSCs) can be extracted from a patient with a β-hemoglobinopathy using techniques that are well-known to skilled artisans (e.g., apheresis or leukapheresis) and stem cells can be removed from the PBSCs. The genome editing methods described above can be performed on the stem cells and the modified stem cells can be reintroduced into the patient as described above.

### SEQUENCES

[0307] Genome editing system components according to the present disclosure (including without limitation, RNA-guided nucleases, guide RNAs, donor template nucleic acids, nucleic acids encoding nucleases or guide RNAs, and portions or fragments of any of the foregoing), are exemplified by the nucleotide and amino acid sequences presented in the Sequence Listing. The sequences presented in the Sequence Listing are not intended to be limiting, but rather illustrative of certain principles of genome editing systems and their component parts, which, in combination with the instant disclosure, will inform those of skill in the art about additional implementations and modifications that are within the scope of this disclosure. A list of the sequences presented is provided in the following Table 19.

TABLE 19
Sequences presented in the Sequence Listing:

| SEQ ID NOS: | Description |
|---|---|
| 1-2, 4-6, 12, 14 | Cas9 polypeptides |
| 3, 7-11, 13 | Cas9 coding sequences |
| 15-23, 52-123 | Cas9 RuvC-like domains |
| 24-28, 124-198 | Cas9 HNH-like domains |
| 29-31, 38-51 | Full-length modular and unimolecular |
| | gRNAs |
| 32-37 | gRNA proximal and tail domains |
| 199-205 | PAM sequences |
| 251-901, 940-942, | gRNA targeting domains (RNA)- see |
| 952-955, 1329-1639 | Tables 2, 7, 9, 10, 12, 17, 18 |
| 910-919, 943-945, | gRNA targeting domains (DNA)- see |
| 956-959, 978-1328 | Tables 7, 9, 12 |
| 920-929, 946-948, | gRNA targeting domains plus PAM |
| 960-963 | (NGG) (RNA) - see Tables 7, 9 |
| 930-939, 949-951, | gRNA targeting domains plus PAM |
| 964-967 | (NGG) (DNA) - see Tables 7, 9 |
| 970, 972, 974, 976 | dgRNA targeting domains (RNA) - see |
| | Table 10 |
| 971, 973, 975, 977 | dgRNA targeting domains (DNA) - see |
| | Table 10 |
| 902, 903 | Human HBG1, 2 promoter sequences |
| | including HPFH deletion site |
| 904-909 | Oligonucleotide donor sequences and |
| | homology arms - see Table 8 |
| 968-969 | BCL11Ae sequences |
| 1640-1660 | Genomic Coordinates of HbG Regions of |
| | interest, Table 13 |

### INCORPORATION BY REFERENCE

[0308] All publications, patents, and patent applications mentioned herein are hereby incorporated by reference in their entirety as if each individual publication, patent or patent application was specifically and individually indicated to be incorporated by reference. In case of conflict, the present application, including any definitions herein, will control.

### EQUIVALENTS

[0309] Those skilled in the art will recognize, or be able to ascertain using no more than routine experimentation, many equivalents to the specific embodiments described herein. Such equivalents are intended to be encompassed by the following claims.

### REFERENCES

[0310] Aliyu et al. Am J Hematol 83:63-70 (2008)
[0311] Angastiniotis & Modell Ann N Y Acad Sci 850:251-269 (1998)
[0312] Anders et al. Nature 513(7519):569-573 (2014)
[0313] Bae et al. Bioinformatics 30(10):1473-1475 (2014)
[0314] Bothmer et al. Nat Commun 8:13905 (2017)
[0315] Bouva Hematologica 91(1):129-132 (2006)
[0316] Briner et al. Mol Cell 56(2):333-339 (2014)
[0317] Brousseau Am J Hematol 85(1):77-78 (2010)
[0318] Canvers et al. Nature 527(12):192-197 (2015)
[0319] Chang et al. Mol Ther Methods Clin Dev 4:137-148 (2017)
[0320] Chen et al. Nat Commun 8:14958 (2017)
[0321] Cong et al. Science 399(6121):819-823 (2013)
[0322] Cornish-Bowden Nucleic Acids Res 13(9):3021-3030 (1985)
[0323] Davis & Maizels Proc Natl Acad Sci USA 111(10):E924-E932 (2014)
[0324] Fine et al. Sci Rep 5:10777 (2015)
[0325] Frit et al. DNA Repair (Amst.) 17:81-97 (2014)
[0326] Fu et al. Nat Biotechnol 32(3):279-284 (2014)
[0327] Guilinger et al. Nat Biotechnol 32(6):577-582 (2014)
[0328] Heigwer et al. Nat Methods 11(2):122-123 (2014)
[0329] Hinz et al. J Biol Chem 291(48):24851-24856 (2016)
[0330] Hsu et al. Nat Biotechnol 31(9):827-832 (2013)
[0331] Iyama & Wilson DNA Repair (Amst.) 12(8):620-636 (2013)
[0332] Jiang et al. Nat Biotechnol 31(3):233-239 (2013)
[0333] Jinek et al. Science 337(6096):816-821 (2012)
[0334] Jinek et al. Science 343(6176):1247997 (2014)
[0335] Joung et al., Nat Protocols 12: 828-863 (2017)
[0336] Kleinstiver et al. Nature 523(7561):481-485 (2015a)
[0337] Kleinstiver et al. Nat Biotechnol 33(12):1293-1298 (2015b)
[0338] Kleinstiver et al. Nature 529(7587):490-495 (2016)
[0339] Komor et al. Nature 533(7603):420-424 (2016)
[0340] Kurita et al. PLoS ONE 8(3):e59890 (2013)
[0341] Lee et al. Nano Lett 12(12):6322-6327 (2012)
[0342] Lewis “Medical-Surgical Nursing: Assessment and Management of Clinical Problems” (2014)
[0343] Makarova et al. Nat Rev Microbiol 9(6):467-477 (2011)
[0344] Mali et al. Science 339(6121):823-826 (2013)
[0345] Nishimasu et al. Cell 156(5):935-949 (2014)
[0346] Nishimasu et al. Cell 162(5):1113-1126 (2015)
[0347] Ran et al. Cell 154(6):1380-1389 (2013)
[0348] Ran et al. Nature 520(7546):186-191 (2015)
[0349] Richardson et al. Nat Biotechnol 34(3):339-344 (2016)
[0350] Shmakov et al. Mol Cell 60:385-397 (2015)
[0351] Thein Hum Mol Genet 18(R2):R216-223 (2009)
[0352] Thorpe Br J Haematol. 87(1):125-132 (1994)
[0353] Tsai et al. Nat Biotechnol 34(5):483 (2016)
[0354] Wang et al. Cell 153(4):910-918 (2013)
[0355] Xiao et al. Bioinformatics 30(8):1180-1182 (2014)
[0356] Yamano et al. Cell 165(4):949-962 (2016)
[0357] Zetsche et al. Nat Biotechnol 33(2):139-142 (2015a)
[0358] Zetsche et al. Cell 163(3):759-771 (2015b)

The application's sequence listing, which the Patent Office published only in electronic form, follows.

SEQUENCE LISTING (1661 sequences)

SEQ ID NO: 1 - protein, 1345 aa, Streptococcus mutans
  REGION 10..21: note = misc_feature - N-terminal RuvC-like domain
  REGION 759..766: note = misc_feature - RuvC-like domain
  REGION 837..863: note = misc_feature - HNH-like domain
  REGION 982..989: note = misc_feature - RuvC-like domain
MKKPYSIGLDIGTNSVGWAVVTDDYKVPAKKMKVLGNTDKSHIEKNLLGALLFDSGNTAEDRRLKRTARRRYTRRRNRILYLQEIFSEEMGKVDDSFFHRLEDSFLVTEDKRGERHPIFGNLEEEVKYHENFPTIYHLRQYLADNPEKVDLRLVYLALAHIIKFRGHFLIEGKFDTRNNDVQRLFQEFLAVYDNTFENSSLQEQNVQVEEILTDKISKSAKKDRVLKLFPNEKSNGRFAEFLKLIVGNQADFKKHFELEEKAPLQFSKDTYEEELEVLLAQIGDNYAELFLSAKKLYDSILLSGILTVTDVGTKAPLSASMIQRYNEHQMDLAQLKQFIRQKLSDKYNEVFSDVSKDGYAGYIDGKTNQEAFYKYLKGLLNKIEGSGYFLDKIEREDFLRKQRTFDNGSIPHQIHLQEMRAIIRRQAEFYPFLADNQDRIEKLLTFRIPYYVGPLARGKSDFAWLSRKSADKITPWNFDEIVDKESSAEAFINRMTNYDLYLPNQKVLPKHSLLYEKFTVYNELTKVKYKTEQGKTAFFDANMKQEIFDGVFKVYRKVTKDKLMDFLEKEFDEFRIVDLTGLDKENKVFNASYGTYHDLCKILDKDFLDNSKNEKILEDIVLTLTLFEDREMIRKRLENYSDLLTKEQVKKLERRHYTGWGRLSAELIHGIRNKESRKTILDYLIDDGNSNRNFMQLINDDALSFKEEIAKAQVIGETDNLNQVVSDIAGSPAIKKGILQSLKIVDELVKIMGHQPENIVVEMARENQFTNQGRRNSQQRLKGLTDSIKEFGSQILKEHPVENSQLQNDRLFLYYLQNGRDMYTGEELDIDYLSQYDIDHIIPQAFIKDNSIDNRVLTSSKENRGKSDDVPSKDVVRKMKSYWSKLLSAKLITQRKFDNLTKAERGGLTDDDKAGFIKRQLVETRQITKHVARILDERFNTETDENNKKIRQVKIVTLKSNLVSNFRKEFELYKVREINDYHHAHDAYLNAVIGKALLGVYPQLEPEFVYGDYPHFHGHKENKATAKKFFYSNIMNFFKKDDVRTDKNGEIIWKKDEHISNIKKVLSYPQVNIVKKVEEQTGGFSKESILPKGNSDKLIPRKTKKFYWDTKKYGGFDSPIVAYSILVIADIEKGKSKKLKTVKALVGVTIMEKMTFERDPVAFLERKGYRNVQEENIIKLPKYSLFKLENGRKRLLASARELQKGNEIVLPNHLGTLLYHAKNIHKVDEPKHLDYVDKHKDEFKELLDVVSNFSKKYTLAEGNLEKIKELYAQNNGEDLKELASSFINLLTFTAIGAPATFKFFDKNIDRKRYTSTTEILNATLIHQSITGLYETRIDLNKLGGD

SEQ ID NO: 2 - protein, 1368 aa, Streptococcus pyogenes [sequence omitted]

SEQ ID NO: 3 - DNA, 4107 bp, Streptococcus pyogenes
  source 1..4107: mol_type = other DNA
atggataaaaagtacagcatcgggctggacatcggtacaaactcagtggggtgggccgtgattacggacgagtacaaggtaccctccaaaaaatttaaagtgctgggtaacacggacagacactctataaagaaaaatcttattggagccttgctgttcgactcaggcgagacagccgaagccacaaggttgaagcggaccgccaggaggcggtataccaggagaaagaaccgcatatgctacctgcaagaaatcttcagtaacgagatggcaaaggttgacgatagctttttccatcgcctggaagaatcctttcttgttgaggaagacaagaagcacgaacggcaccccatctttggcaatattgtcgacgaagtggcatatcacgaaaagtacccgactatctaccacctcaggaagaagctggtggactctaccgataaggcggacctcagacttatttatttggcactcgcccacatgattaaatttagaggacatttcttgatcgagggcgacctgaacccggacaacagtgacgtcgataagctgttcatccaacttgtgcagacctacaatcaactgttcgaagaaaaccctataaatgcttcaggagtcgacgctaaagcaatcctgtccgcgcgcctctcaaaatctagaagacttgagaatctgattgctcagttgcccggggaaaagaaaaatggattgtttggcaacctgatcgccctcagtctcggactgaccccaaatttcaaaagtaacttcgacctggccgaagacgctaagctccagctgtccaaggacacatacgatgacgacctcgacaatctgctggcccagattggggatcagtacgccgatctctttttggcagcaaagaacctgtccgacgccatcctgttgagcgatatcttgagagtgaacaccgaaattactaaagcaccccttagcgcatctatgatcaagcggtacgacgagcatcatcaggatctgaccctgctgaaggctcttgtgaggcaacagctccccgaaaaatacaaggaaatcttctttgaccagagcaaaaacggctacgctggctatatagatggtggggccagtcaggaggaattctataaattcatcaagcccattctcgagaaaatggacggcacagaggagttgctggtcaaacttaacagggaggacctgctgcggaagcagcggacctttgacaacgggtctatcccccaccagattcatctgggcgaactgcacgcaatcctgaggaggcaggaggatttttatccttttcttaaagataaccgcgagaaaatagaaaagattcttacattcaggatcccgtactacgtgggacctctcgcccggggcaattcacggtttgcctggatgacaaggaagtcagaggagactattacaccttggaacttcgaagaagtggtggacaagggtgcatctgcccagtctttcatcgagcggatgacaaattttgacaagaacctccctaatgagaaggtgctgcccaaacattctctgctctacgagtactttaccgtctacaatgaactgactaaagtcaagtacgtcaccgagggaatgaggaagccggcattccttagtggagaacagaagaaggcgattgtagacctgttgttcaagaccaacaggaaggtgactgtgaagcaacttaaagaagactactttaagaagatcgaatgttttgacagtgtggaaatttcaggggttgaagaccgcttcaatgcgtcattggggacttaccatgatcttctcaagatcataaaggacaaagacttcctggacaacgaagaaaatgaggatattctcgaagacatcgtcctcaccctgaccctgttcgaagacagggaaatgatagaagagcgcttgaaaacctatgcccacctcttcgacgataaagttatgaagcagctgaagcgcaggagatacacaggatggggaagattgtcaaggaagctgatcaatggaattagggataaacagagtggcaagaccatactggatttcctcaaatctgatggcttcgccaataggaacttcatgcaactgattcacgatgactctcttaccttcaaggaggacattcaaaaggctcaggtgagcgggcagggagactcccttcatgaacacatcgcgaatttggcaggttcccccgctattaaaaagggcatccttcaaactgtcaaggtggtggatgaattggtcaaggtaatgggcagacataagccagaaaatattgtgatcgagatggcccgcgaaaaccagaccacacagaagggccagaaaaatagtagagagcggatgaagaggatcgaggagggcatcaaagagctgggatctcagattctcaaagaacaccccgtagaaaacacacagctgcagaacgaaaaattgtacttgtactatctgcagaacggcagagacatgtacgtcgaccaagaacttgatattaatagactgtccgactatgacgtagaccatatcgtgccccagtccttcctgaaggacgactccattgataacaaagtcttgacaagaagcgacaagaacaggggtaaaagtgataatgtgcctagcgaggaggtggtgaaaaaaatgaagaactactggcgacagctgcttaatgcaaagctcattacacaacggaagttcgataatctgacgaaagcagagagaggtggcttgtctgagttggacaaggcagggtttattaagcggcagctggtggaaactaggcagatcacaaagcacgtggcgcagattttggacagccggatgaacacaaaatacgacgaaaatgataaactgatacgagaggtcaaagttatcacgctgaaaagcaagctggtgtccgattttcggaaagacttccagttctacaaagttcgcgagattaataactaccatcatgctcacgatgcgtacctgaacgctgttgtcgggaccgccttgataaagaagtacccaaagctggaatccgagttcgtatacggggattacaaagtgtacgatgtgaggaaaatgatagccaagtccgagcaggagattggaaaggccacagctaagtacttcttttattctaacatcatgaatttttttaagacggaaattaccctggccaacggagagatcagaaagcggccccttatagagacaaatggtgaaacaggtgaaatcgtctgggataagggcagggatttcgctactgtgaggaaggtgctgagtatgccacaggtaaatatcgtgaaaaaaaccgaagtacagaccggaggattttccaaggaaagcattttgcctaaaagaaactcagacaagctcatcgcccgcaagaaagattgggaccctaagaaatacgggggatttgactcacccaccgtagcctattctgtgctggtggtagctaaggtggaaaaaggaaagtctaagaagctgaagtccgtgaaggaactcttgggaatcactatcatggaaagatcatcctttgaaaagaaccctatcgatttcctggaggctaagggttacaaggaggtcaagaaagacctcatcattaaactgccaaaatactctctcttcgagctggaaaatggcaggaagagaatgttggccagcgccggagagctgcaaaagggaaacgagcttgctctgccctccaaatatgttaattttctctatctcgcttcccactatgaaaagctgaaagggtctcccgaagataacgagcagaagcagctgttcgtcgaacagcacaagcactatctggatgaaataatcgaacaaataagcgagttcagcaaaagggttatcctggcggatgctaatttggacaaagtactgtctgcttataacaagcaccgggataagcctattagggaacaagccgagaatataattcacctctttacactcacgaatctcggagcccccgccgccttcaaatactttgatacgactatcgaccggaaacggtataccagtaccaaagaggtcctcgatgccaccctcatccaccagtcaattactggcctgtacgaaacacggatcgacctctctcaactgggcggcgactag

SEQ ID NO: 4 - protein, 1388 aa, Streptococcus thermophilus
  REGION 10..21: note = misc_feature - N-terminal RuvC-like domain
  REGION 760..767: note = misc_feature - RuvC-like domain
  REGION 844..870: note = misc_feature - HNH-like domain
  REGION 989..996: note = misc_feature - RuvC-like domain
MTKPYSIGLDIGTNSVGWAVTTDNYKVPSKKMKVLGNTSKKYIKKNLLGVLLFDSGITAEGRRLKRTARRRYTRRRNRILYLQEIFSTEMATLDDAFFQRLDDSFLVPDDKRDSKYPIFGNLVEEKAYHDEFPTIYHLRKYLADSTKKADLRLVYLALAHMIKYRGHFLIEGEFNSKNNDIQKNFQDFLDTYNAIFESDLSLENSKQLEEIVKDKISKLEKKDRILKLFPGEKNSGIFSEFLKLIVGNQADFRKCFNLDEKASLHFSKESYDEDLETLLGYIGDDYSDVFLKAKKLYDAILLSGFLTVTDNETEAPLSSAMIKRYNEHKEDLALLKEYIRNISLKTYNEVFKDDTKNGYAGYIDGKTNQEDFYVYLKKLLAEFEGADYFLEKIDREDFLRKQRTFDNGSIPYQIHLQEMRAILDKQAKFYPFLAKNKERIEKILTFRIPYYVGPLARGNSDFAWSIRKRNEKITPWNFEDVIDKESSAEAFINRMTSFDLYLPEEKVLPKHSLLYETFNVYNELTKVRFIAESMRDYQFLDSKQKKDIVRLYFKDKRKVTDKDIIEYLHAIYGYDGIELKGIEKQFNSSLSTYHDLLNIINDKEFLDDSSNEAIIEEIIHTLTIFEDREMIKQRLSKFENIFDKSVLKKLSRRHYTGWGKLSAKLINGIRDEKSGNTILDYLIDDGISNRNFMQLIHDDALSFKKKIQKAQIIGDEDKGNIKEVVKSLPGSPAIKKGILQSIKIVDELVKVMGGRKPESIVVEMARENQYTNQGKSNSQQRLKRLEKSLKELGSKILKENIPAKLSKIDNNALQNDRLYLYYLQNGKDMYTGDDLDIDRLSNYDIDHIIPQAFLKDNSIDNKVLVSSASNRGKSDDVPSLEVVKKRKTFWYQLLKSKLISQRKFDNLTKAERGGLSPEDKAGFIQRQLVETRQITKHVARLLDEKFNNKKDENNRAVRTVKIITLKSTLVSQFRKDFELYKVREINDFHHAHDAYLNAVVASALLKKYPKLEPEFVYGDYPKYNSFRERKSATEKVYFYSNIMNIFKKSISLADGRVIERPLIEVNEETGESVWNKESDLATVRRVLSYPQVNVVKKVEEQNHGLDRGKPKGLFNANLSSKPKPNSNENLVGAKEYLDPKKYGGYAGISNSFTVLVKGTIEKGAKKKITNVLEFQGISILDRINYRKDKLNFLLEKGYKDIELIIELPKYSLFELSDGSRRMLASILSTNNKRGEIHKGNQIFLSQKFVKLLYHAKRISNTINENHRKYVENHKKEFEELFYYILEFNENYVGAKKNGKLLNSAFQSWQNHSIDELCSSFIGPTGSERKGLFELTSRGSAADFEFLGVKIPRYRDYTPSSLLKDATLIHQSVTGLYETRIDLAKLGEG

SEQ ID NO: 5 - protein, 1334 aa, Listeria innocua
  REGION 10..21: note = misc_feature - N-terminal RuvC-like domain
  REGION 762..769: note = misc_feature - RuvC-like domain
  REGION 840..866: note = misc_feature - HNH-like domain
  REGION 985..992: note = misc_feature - RuvC-like domain
MKKPYTIGLDIGTNSVGWAVLTDQYDLVKRKMKIAGDSEKKQIKKNFWGVRLFDEGQTAADRRMARTARRRIERRRNRISYLQGIFAEEMSKTDANFFCRLSDSFYVDNEKRNSRHPFFATIEEEVEYHKNYPTIYHLREELVNSSEKADLRLVYLALAHIIKYRGNFLIEGALDTQNTSVDGIYKQFIQTYNQVFASGIEDGSLKKLEDNKDVAKILVEKVTRKEKLERILKLYPGEKSAGMFAQFISLIVGSKGNFQKPFDLIEKSDIECAKDSYEEDLESLLALIGDEYAELFVAAKNAYSAVVLSSIITVAETETNAKLSASMIERFDTHEEDLGELKAFIKLHLPKHYEEIFSNTEKHGYAGYIDGKTKQADFYKYMKMTLENIEGADYFIAKIEKENFLRKQRTFDNGAIPHQLHLEELEAILHQQAKYYPFLKENYDKIKSLVTFRIPYFVGPLANGQSEFAWLTRKADGEIRPWNIEEKVDFGKSAVDFIEKMTNKDTYLPKENVLPKHSLCYQKYLVYNELTKVRYINDQGKTSYFSGQEKEQIFNDLFKQKRKVKKKDLELFLRNMSHVESPTIEGLEDSFNSSYSTYHDLLKVGIKQEILDNPVNTEMLENIVKILTVFEDKRMIKEQLQQFSDVLDGVVLKKLERRHYTGWGRLSAKLLMGIRDKQSHLTILDYLMNDDGLNRNLMQLINDSNLSFKSIIEKEQVTTADKDIQSIVADLAGSPAIKKGILQSLKIVDELVSVMGYPPQTIVVEMARENQTTGKGKNNSRPRYKSLEKAIKEFGSQILKEHPTDNQELRNNRLYLYYLQNGKDMYTGQDLDIHNLSNYDIDHIVPQSFITDNSIDNLVLTSSAGNREKGDDVPPLEIVRKRKVFWEKLYQGNLMSKRKFDYLTKAERGGLTEADKARFIHRQLVETRQITKNVANILHQRFNYEKDDHGNTMKQVRIVTLKSALVSQFRKQFQLYKVRDVNDYHHAHDAYLNGVVANTLLKVYPQLEPEFVYGDYHQFDWFKANKATAKKQFYTNIMLFFAQKDRIIDENGEILWDKKYLDTVKKVMSYRQMNIVKKTEIQKGEFSKATIKPKGNSSKLIPRKTNWDPMKYGGLDSPNMAYAVVIEYAKGKNKLVFEKKIIRVTIMERKAFEKDEKAFLEEQGYRQPKVLAKLPKYTLYECEEGRRRMLASANEAQKGNQQVLPNHLVTLLHHAANCEVSDGKSLDYIESNREMFAELLAHVSEFAKRYTLAEANLNKINQLFEQNKEGDIKAIAQSFVDLMAFNAMGAPASFKFFETTIERKRYNNLKELLNSTIIYQSITGLYESRKRLDD

SEQ ID NO: 6 - protein, 1053 aa, Staphylococcus aureus
MKRNYILGLDIGITSVGYGIIDYETRDVIDAGVRLFKEANVENNEGRRSKRGARRLKRRRRHRIQRVKKLLFDYNLLTDHSELSGINPYEARVKGLSQKLSEEEFSAALLHLAKRRGVHNVNEVEEDTGNELSTKEQISRNSKALEEKYVAELQLERLKKDGEVRGSINRFKTSDYVKEAKQLLKVQKAYHQLDQSFIDTYIDLLETRRTYYEGPGEGSPFGWKDIKEWYEMLMGHCTYFPEELRSVKYAYNADLYNALNDLNNLVITRDENEKLEYYEKFQIIENVFKQKKKPTLKQIAKEILVNEEDIKGYRVTSTGKPEFTNLKVYHDIKDITARKEIIENAELLDQIAKILTIYQSSEDIQEELTNLNSELTQEEIEQISNLKGYTGTHNLSLKAINLILDELWHTNDNQIAIFNRLKLVPKKVDLSQQKEIPTTLVDDFILSPVVKRSFIQSIKVINAIIKKYGLPNDIIIELAREKNSKDAQKMINEMQKRNRQTNERIEEIIRTTGKENAKYLIEKIKLHDMQEGKCLYSLEAIPLEDLLNNPFNYEVDHIIPRSVSFDNSFNNKVLVKQEENSKKGNRTPFQYLSSSDSKISYETFKKHILNLAKGKGRISKTKKEYLLEERDINRFSVQKDFINRNLVDTRYATRGLMNLLRSYFRVNNLDVKVKSINGGFTSFLRRKWKFKKERNKGYKHHAEDALIIANADFIFKEWKKLDKAKKVMENQMFEEKQAESMPEIETEQEYKEIFITPHQIKHIKDFKDYKYSHRVDKKPNRELINDTLYSTRKDDKGNTLIVNNLNGLYDKDNDKLKKLINKSPEKLLMYHHDPQTYQKLKLIMEQYGDEKNPLYKYYEETGNYLTKYSKKDNGPVIKKIKYYGNKLNAHLDITDDYPNSRNKVVKLSLKPYRFDVYLDNGVYKFVTVKNLDVIKKENYYEVNSKCYEEAKKLKKISNQAEFIASFYNNDLIKINGELYRVIGVNNDLLNRIEVNMIDITYREYLENMNDKRPPRIIKTIASKTQSIKKYSTDILGNLYEVKSKKHPQIIKKG

SEQ ID NO: 7 - DNA, 3159 bp, Staphylococcus aureus
  source 1..3159: mol_type = other DNA
atgaaaaggaactacattctggggctggacatcgggattacaagcgtggggtatgggattattgactatgaaacaagggacgtgatcgacgcaggcgtcagactgttcaaggaggccaacgtggaaaacaatgagggacggagaagcaagaggggagccaggcgcctgaaacgacggagaaggcacagaatccagagggtgaagaaactgctgttcgattacaacctgctgaccgaccattctgagctgagtggaattaatccttatgaagccagggtgaaaggcctgagtcagaagctgtcagaggaagagttttccgcagctctgctgcacctggctaagcgccgaggagtgcataacgtcaatgaggtggaagaggacaccggcaacgagctgtctacaaaggaacagatctcacgcaatagcaaagctctggaagagaagtatgtcgcagagctgcagctggaacggctgaagaaagatggcgaggtgagagggtcaattaataggttcaagacaagcgactacgtcaaagaagccaagcagctgctgaaagtgcagaaggcttaccaccagctggatcagagcttcatcgatacttatatcgacctgctggagactcggagaacctactatgagggaccaggagaagggagccccttcggatggaaagacatcaaggaatggtacgagatgctgatgggacattgcacctattttccagaagagctgagaagcgtcaagtacgcttataacgcagatctgtacaacgccctgaatgacctgaacaacctggtcatcaccagggatgaaaacgagaaactggaatactatgagaagttccagatcatcgaaaacgtgtttaagcagaagaaaaagcctacactgaaacagattgctaaggagatcctggtcaacgaagaggacatcaagggctaccgggtgacaagcactggaaaaccagagttcaccaatctgaaagtgtatcacgatattaaggacatcacagcacggaaagaaatcattgagaacgccgaactgctggatcagattgctaagatcctgactatctaccagagctccgaggacatccaggaagagctgactaacctgaacagcgagctgacccaggaagagatcgaacagattagtaatctgaaggggtacaccggaacacacaacctgtccctgaaagctatcaatctgattctggatgagctgtggcatacaaacgacaatcagattgcaatctttaaccggctgaagctggtcccaaaaaaggtggacctgagtcagcagaaagagatcccaaccacactggtggacgatttcattctgtcacccgtggtcaagcggagcttcatccagagcatcaaagtgatcaacgccatcatcaagaagtacggcctgcccaatgatatcattatcgagctggctagggagaagaacagcaaggacgcacagaagatgatcaatgagatgcagaaacgaaaccggcagaccaatgaacgcattgaagagattatccgaactaccgggaaagagaacgcaaagtacctgattgaaaaaatcaagctgcacgatatgcaggagggaaagtgtctgtattctctggaggccatccccctggaggacctgctgaacaatccattcaactacgaggtcgatcatattatccccagaagcgtgtccttcgacaattcctttaacaacaaggtgctggtcaagcaggaagagaactctaaaaagggcaataggactcctttccagtacctgtctagttcagattccaagatctcttacgaaacctttaaaaagcacattctgaatctggccaaaggaaagggccgcatcagcaagaccaaaaaggagtacctgctggaagagcgggacatcaacagattctccgtccagaaggattttattaaccggaatctggtggacacaagatacgctactcgcggcctgatgaatctgctgcgatcctatttccgggtgaacaatctggatgtgaaagtcaagtccatcaacggcgggttcacatcttttctgaggcgcaaatggaagtttaaaaaggagcgcaacaaagggtacaagcaccatgccgaagatgctctgattatcgcaaatgccgacttcatctttaaggagtggaaaaagctggacaaagccaagaaagtgatggagaaccagatgttcgaagagaagcaggccgaatctatgcccgaaatcgagacagaacaggagtacaaggagattttcatcactcctcaccagatcaagcatatcaaggatttcaaggactacaagtactctcaccgggtggataaaaagcccaacagagagctgatcaatgacaccctgtatagtacaagaaaagacgataaggggaataccctgattgtgaacaatctgaacggactgtacgacaaagataatgacaagctgaaaaagctgatcaacaaaagtcccgagaagctgctgatgtaccaccatgatcctcagacatatcagaaactgaagctgattatggagcagtacggcgacgagaagaacccactgtataagtactatgaagagactgggaactacctgaccaagtatagcaaaaaggataatggccccgtgatcaagaagatcaagtactatgggaacaagctgaatgcccatctggacatcacagacgattaccctaacagtcgcaacaaggtggtcaagctgtcactgaagccatacagattcgatgtctatctggacaacggcgtgtataaatttgtgactgtcaagaatctggatgtcatcaaaaaggagaactactatgaagtgaatagcaagtgctacgaagaggctaaaaagctgaaaaagattagcaaccaggcagagttcatcgcctccttttacaacaacgacctgattaagatcaatggcgaactgtatagggtcatcggggtgaacaatgatctgctgaaccgcattgaagtgaatatgattgacatcacttaccgagagtatctggaaaacatgaatgataagcgcccccctcgaattatcaaaacaattgcctctaagactcagagtatcaaaaagtactcaaccgacattctgggaaacctgtatgaggtgaagagcaaaaagcaccctcagattatcaaaaagggc

SEQ ID NO: 8 - DNA, 3159 bp, Staphylococcus aureus
  source 1..3159: mol_type = other DNA
atgaagcggaactacatcctgggcctggacatcggcatcaccagcgtgggctacggcatcatcgactacgagacacgggacgtgatcgatgccggcgtgcggctgttcaaagaggccaacgtggaaaacaacgagggcaggcggagcaagagaggcgccagaaggctgaagcggcggaggcggcatagaatccagagagtgaagaagctgctgttcgactacaacctgctgaccgaccacagcgagctgagcggcatcaacccctacgaggccagagtgaagggcctgagccagaagctgagcgaggaagagttctctgccgccctgctgcacctggccaagagaagaggcgtgcacaacgtgaacgaggtggaagaggacaccggcaacgagctgtccaccaaagagcagatcagccggaacagcaaggccctggaagagaaatacgtggccgaactgcagctggaacggctgaagaaagacggcgaagtgcggggcagcatcaacagattcaagaccagcgactacgtgaaagaagccaaacagctgctgaaggtgcagaaggcctaccaccagctggaccagagcttcatcgacacctacatcgacctgctggaaacccggcggacctactatgagggacctggcgagggcagccccttcggctggaaggacatcaaagaatggtacgagatgctgatgggccactgcacctacttccccgaggaactgcggagcgtgaagtacgcctacaacgccgacctgtacaacgccctgaacgacctgaacaatctcgtgatcaccagggacgagaacgagaagctggaatattacgagaagttccagatcatcgagaacgtgttcaagcagaagaagaagcccaccctgaagcagatcgccaaagaaatcctcgtgaacgaagaggatattaagggctacagagtgaccagcaccggcaagcccgagttcaccaacctgaaggtgtaccacgacatcaaggacattaccgcccggaaagagattattgagaacgccgagctgctggatcagattgccaagatcctgaccatctaccagagcagcgaggacatccaggaagaactgaccaatctgaactccgagctgacccaggaagagatcgagcagatctctaatctgaagggctataccggcacccacaacctgagcctgaaggccatcaacctgatcctggacgagctgtggcacaccaacgacaaccagatcgctatcttcaaccggctgaagctggtgcccaagaaggtggacctgtcccagcagaaagagatccccaccaccctggtggacgacttcatcctgagccccgtcgtgaagagaagcttcatccagagcatcaaagtgatcaacgccatcatcaagaagtacggcctgcccaacgacatcattatcgagctggcccgcgagaagaactccaaggacgcccagaaaatgatcaacgagatgcagaagcggaaccggcagaccaacgagcggatcgaggaaatcatccggaccaccggcaaagagaacgccaagtacctgatcgagaagatcaagctgcacgacatgcaggaaggcaagtgcctgtacagcctggaagccatccctctggaagatctgctgaacaaccccttcaactatgaggtggaccacatcatccccagaagcgtgtccttcgacaacagcttcaacaacaaggtgctcgtgaagcaggaagaaaacagcaagaagggcaaccggaccccattccagtacctgagcagcagcgacagcaagatcagctacgaaaccttcaagaagcacatcctgaatctggccaagggcaagggcagaatcagcaagaccaagaaagagtatctgctggaagaacgggacatcaacaggttctccgtgcagaaagacttcatcaaccggaacctggtggataccagatacgccaccagaggcctgatgaacctgctgcggagctacttcagagtgaacaacctggacgtgaaagtgaagtccatcaatggcggcttcaccagctttctgcggcggaagtggaagtttaagaaagagcggaacaaggggtacaagcaccacgccgaggacgccctgatcattgccaacgccgatttcatcttcaaagagtggaagaaactggacaaggccaaaaaagtgatggaaaaccagatgttcgaggaaaagcaggccgagagcatgcccgagatcgaaaccgagcaggagtacaaagagatcttcatcaccccccaccagatcaagcacattaaggacttcaaggactacaagtacagccaccgggtggacaagaagcctaatagagagctgattaacgacaccctgtactccacccggaaggacgacaagggcaacaccctgatcgtgaacaatctgaacggcctgtacgacaaggacaatgacaagctgaaaaagctgatcaacaagagccccgaaaagctgctgatgtaccaccacgacccccagacctaccagaaactgaagctgattatggaacagtacggcgacgagaagaatcccctgtacaagtactacgaggaaaccgggaactacctgaccaagtactccaaaaaggacaacggccccgtgatcaagaagattaagtattacggcaacaaactgaacgcccatctggacatcaccgacgactaccccaacagcagaaacaaggtcgtgaagctgtccctgaagccctacagattcgacgtgtacctggacaatggcgtgtacaagttcgtgaccgtgaagaatctggatgtgatcaaaaaagaaaactactacgaagtgaatagcaagtgctatgaggaagctaagaagctgaagaagatcagcaaccaggccgagtttatcgcctccttctacaacaacgatctgatcaagatcaacggcgagctgtatagagtgatcggcgtgaacaacgacctgctgaaccggatcgaagtgaacatgatcgacatcacctaccgcgagtacctggaaaacatgaacgacaagaggccccccaggatcattaagacaatcgcctccaagacccagagcattaagaagtacagcacagacattctgggcaacctgtatgaagtgaaatctaagaagcaccctcagatcatcaaaaagggc

SEQ ID NO: 9 - DNA, 3159 bp, Staphylococcus aureus
  source 1..3159: mol_type = other DNA
atgaagcgcaactacatcctcggactggacatcggcattacctccgtgggatacggcatcatcgattacgaaactagggatgtgatcgacgctggagtcaggctgttcaaagaggcgaacgtggagaacaacgaggggcggcgctcaaagaggggggcccgccggctgaagcgccgccgcagacatagaatccagcgcgtgaagaagctgctgttcgactacaaccttctgaccgaccactccgaactttccggcatcaacccatatgaggctagagtgaagggattgtcccaaaagctgtccgaggaagagttctccgccgcgttgctccacctcgccaagcgcaggggagtgcacaatgtgaacgaagtggaagaagataccggaaacgagctgtccaccaaggagcagatcagccggaactccaaggccctggaagagaaatacgtggcggaactgcaactggagcggctgaagaaagacggagaagtgcgcggctcgatcaaccgcttcaagacctcggactacgtgaaggaggccaagcagctcctgaaagtgcaaaaggcctatcaccaacttgaccagtcctttatcgatacctacatcgatctgctcgagactcggcggacttactacgagggtccaggggagggctccccatttggttggaaggatattaaggagtggtacgaaatgctgatgggacactgcacatacttccctgaggagctgcggagcgtgaaatacgcatacaacgcagacctgtacaacgcgctgaacgacctgaacaatctcgtgatcacccgggacgagaacgaaaagctcgagtattacgaaaagttccagattattgagaacgtgttcaaacagaagaagaagccgacactgaagcagattgccaaggaaatcctcgtgaacgaagaggacatcaagggctatcgagtgacctcaacgggaaagccggagttcaccaatctgaaggtctaccacgacatcaaagacattaccgcccggaaggagatcattgagaacgcggagctgttggaccagattgcgaagattctgaccatctaccaatcctccgaggatattcaggaagaactcaccaacctcaacagcgaactgacccaggaggagatagagcaaatctccaacctgaagggctacaccggaactcataacctgagcctgaaggccatcaacttgatcctggacgagctgtggcacaccaacgataaccagatcgctattttcaatcggctgaagctggtccccaagaaagtggacctctcacaacaaaaggagatccctactacccttgtggacgatttcattctgtcccccgtggtcaagagaagcttcatacagtcaatcaaagtgatcaatgccattatcaagaaatacggtctgcccaacgacattatcattgagctcgcccgcgagaagaactcgaaggacgcccagaagatgattaacgaaatgcagaagaggaaccgacagactaacgaacggatcgaagaaatcatccggaccaccgggaaggaaaacgcgaagtacctgatcgaaaagatcaagctccatgacatgcaggaaggaaagtgtctgtactcgctggaggccattccgctggaggacttgctgaacaacccttttaactacgaagtggatcatatcattccgaggagcgtgtcattcgacaattccttcaacaacaaggtcctcgtgaagcaggaggaaaactcgaagaagggaaaccgcacgccgttccagtacctgagcagcagcgactccaagatttcctacgaaaccttcaagaagcacatcctcaacctggcaaaggggaagggtcgcatctccaagaccaagaaggaatatctgctggaagaaagagacatcaacagattctccgtgcaaaaggacttcatcaaccgcaacctcgtggatactagatacgctactcggggtctgatgaacctcctgagaagctactttagagtgaacaatctggacgtgaaggtcaagtcgattaacggaggtttcacctccttcctgcggcgcaagtggaagttcaagaaggaacggaacaagggctacaagcaccacgccgaggacgccctgatcattgccaacgccgacttcatcttcaaagaatggaagaaacttgacaaggctaagaaggtcatggaaaaccagatgttcgaagaaaagcaggccgagtctatgcctgaaatcgagactgaacaggagtacaaggaaatctttattacgccacaccagatcaaacacatcaaggatttcaaggattacaagtactcacatcgcgtggacaaaaagccgaacagggaactgatcaacgacaccctctactccacccggaaggatgacaaagggaataccctcatcgtcaacaaccttaacggcctgtacgacaaggacaacgataagctgaagaagctcattaacaagtcgcccgaaaagttgctgatgtaccaccacgaccctcagacttaccagaagctcaagctgatcatggagcagtatggggacgagaaaaacccgttgtacaagtactacgaagaaactgggaattatctgactaagtactccaagaaagataacggccccgtgattaagaagattaagtactacggcaacaagctgaacgcccatctggacatcaccgatgactaccctaattcccgcaacaaggtcgtcaagctgagcctcaagccctaccggtttgatgtgtaccttgacaatggagtgtacaagttcgtgactgtgaagaaccttgacgtgatcaagaaggagaactactacgaagtcaactccaagtgctacgaggaagcaaagaagttgaagaagatctcgaaccaggccgagttcattgcctccttctataacaacgacctgattaagatcaacggcgaactgtaccgcgtcattggcgtgaacaacgatctcctgaaccgcatcgaagtgaacatgatcgacatcacttaccgggaatacctggagaatatgaacgacaagcgcccgccccggatcattaagactatcgcctcaaagacccagtcgatcaagaagtacagcaccgacatcctgggcaacctgtacgaggtcaaatcgaagaagcacccccagatcatcaagaaggga

SEQ ID NO: 10 - DNA, 3159 bp, Staphylococcus aureus
  source 1..3159: mol_type = other DNA
atgaaaaggaactacattctggggctggccatcgggattacaagcgtggggtatgggattattgactatgaaacaagggacgtgatcgacgcaggcgtcagactgttcaaggaggccaacgtggaaaacaatgagggacggagaagcaagaggggagccaggcgcctgaaacgacggagaaggcacagaatccagagggtgaagaaactgctgttcgattacaacctgctgaccgaccattctgagctgagtggaattaatccttatgaagccagggtgaaaggcctgagtcagaagctgtcagaggaagagttttccgcagctctgctgcacctggctaagcgccgaggagtgcataacgtcaatgaggtggaagaggacaccggcaacgagctgtctacaaaggaacagatctcacgcaatagcaaagctctggaagagaagtatgtcgcagagctgcagctggaacggctgaagaaagatggcgaggtgagagggtcaattaataggttcaagacaagcgactacgtcaaagaagccaagcagctgctgaaagtgcagaaggcttaccaccagctggatcagagcttcatcgatacttatatcgacctgctggagactcggagaacctactatgagggaccaggagaagggagccccttcggatggaaagacatcaaggaatggtacgagatgctgatgggacattgcacctattttccagaagagctgagaagcgtcaagtacgcttataacgcagatctgtacaacgccctgaatgacctgaacaacctggtcatcaccagggatgaaaacgagaaactggaatactatgagaagttccagatcatcgaaaacgtgtttaagcagaagaaaaagcctacactgaaacagattgctaaggagatcctggtcaacgaagaggacatcaagggctaccgggtgacaagcactggaaaaccagagttcaccaatctgaaagtgtatcacgatattaaggacatcacagcacggaaagaaatcattgagaacgccgaactgctggatcagattgctaagatcctgactatctaccagagctccgaggacatccaggaagagctgactaacctgaacagcgagctgacccaggaagagatcgaacagattagtaatctgaaggggtacaccggaacacacaacctgtccctgaaagctatcaatctgattctggatgagctgtggcatacaaacgacaatcagattgcaatctttaaccggctgaagctggtcccaaaaaaggtggacctgagtcagcagaaagagatcccaaccacactggtggacgatttcattctgtcacccgtggtcaagcggagcttcatccagagcatcaaagtgatcaacgccatcatcaagaagtacggcctgcccaatgatatcattatcgagctggctagggagaagaacagcaaggacgcacagaagatgatcaatgagatgcagaaacgaaaccggcagaccaatgaacgcattgaagagattatccgaactaccgggaaagagaacgcaaagtacctgattgaaaaaatcaagctgcacgatatgcaggagggaaagtgtctgtattctctggaggccatccccctggaggacctgctgaacaatccattcaactacgaggtcgatcatattatccccagaagcgtgtccttcgacaattcctttaacaacaaggtgctggtcaagcaggaagagaactctaaaaagggcaataggactcctttccagtacctgtctagttcagattccaagatctcttacgaaacctttaaaaagcacattctgaatctggccaaaggaaagggccgcatcagcaagaccaaaaaggagtacctgctggaagagcgggacatcaacagattctccgtccagaaggattttattaaccggaatctggtggacacaagatacgctactcgcggcctgatgaatctgctgcgatcctatttccgggtgaacaatctggatgtgaaagtcaagtccatcaacggcgggttcacatcttttctgaggcgcaaatggaagtttaaaaaggagcgcaacaaagggtacaagcaccatgccgaagatgctctgattatcgcaaatgccgacttcatctttaaggagtggaaaaagctggacaaagccaagaaagtgatggagaaccagatgttcgaagagaagcaggccgaatctatgcccgaaatcgagacagaacaggagtacaaggagattttcatcactcctcaccagatcaagcatatcaaggatttcaaggactacaagtactctcaccgggtggataaaaagcccaacagagagctgatcaatgacaccctgtatagtacaagaaaagacgataaggggaataccctgattgtgaacaatctgaacggactgtacgacaaagataatgacaagctgaaaaagctgatcaacaaaagtcccgagaagctgctgatgtaccaccatgatcctcagacatatcagaaactgaagctgattatggagcagtacggcgacgagaagaacccactgtataagtactatgaagagactgggaactacctgaccaagtatagcaaaaaggataatggccccgtgatcaagaagatcaagtactatgggaacaagctgaatgcccatctggacatcacagacgattaccctaacagtcgcaacaaggtggtcaagctgtcactgaagccatacagattcgatgtctatctggacaacggcgtgtataaatttgtgactgtcaagaatctggatgtcatcaaaaaggagaactactatgaagtgaatagcaagtgctacgaagaggctaaaaagctgaaaaagattagcaaccaggcagagttcatcgcctccttttacaacaacgacctgattaagatcaatggcgaactgtatagggtcatcggggtgaacaatgatctgctgaaccgcattgaagtgaatatgattgacatcacttaccgagagtatctggaaaacatgaatgataagcgcccccctcgaattatcaaaacaattgcctctaagactcagagtatcaaaaagtactcaaccgacattctgggaaacctgtatgaggtgaagagcaaaaagcaccctcagattatcaaaaagggc

SEQ ID NO: 11 - DNA, 3159 bp, Staphylococcus aureus
  source 1..3159: mol_type = other DNA
atgaaaaggaactacattctggggctggacatcgggattacaagcgtggggtatgggattattgactatgaaacaagggacgtgatcgacgcaggcgtcagactgttcaaggaggccaacgtggaaaacaatgagggacggagaagcaagaggggagccaggcgcctgaaacgacggagaaggcacagaatccagagggtgaagaaactgctgttcgattacaacctgctgaccgaccattctgagctgagtggaattaatccttatgaagccagggtgaaaggcctgagtcagaagctgtcagaggaagagttttccgcagctctgctgcacctggctaagcgccgaggagtgcataacgtcaatgaggtggaagaggacaccggcaacgagctgtctacaaaggaacagatctcacgcaatagcaaagctctggaagagaagtatgtcgcagagctgcagctggaacggctgaagaaagatggcgaggtgagagggtcaattaataggttcaagacaagcgactacgtcaaagaagccaagcagctgctgaaagtgcagaaggcttaccaccagctggatcagagcttcatcgatacttatatcgacctgctggagactcggagaacctactatgagggaccaggagaagggagccccttcggatggaaagacatcaaggaatggtacgagatgctgatgggacattgcacctattttccagaagagctgagaagcgtcaagtacgcttataacgcagatctgtacaacgccctgaatgacctgaacaacctggtcatcaccagggatgaaaacgagaaactggaatactatgagaagttccagatcatcgaaaacgtgtttaagcagaagaaaaagcctacactgaaacagattgctaaggagatcctggtcaacgaagaggacatcaagggctaccgggtgacaagcactggaaaaccagagttcaccaatctgaaagtgtatcacgatattaaggacatcacagcacggaaagaaatcattgagaacgccgaactgctggatcagattgctaagatcctgactatctaccagagctccgaggacatccaggaagagctgactaacctgaacagcgagctgacccaggaagagatcgaacagattagtaatctgaaggggtacaccggaacacacaacctgtccctgaaagctatcaatctgattctggatgagctgtggcatacaaacgacaatcagattgcaatctttaaccggctgaagctggtcccaaaaaaggtggacctgagtcagcagaaagagatcccaaccacactggtggacgatttcattctgtcacccgtggtcaagcggagcttcatccagagcatcaaagtgatcaacgccatcatcaagaagtacggcctgcccaatgatatcattatcgagctggctagggagaagaacagcaaggacgcacagaagatgatcaatgagatgcagaaacgaaaccggcagaccaatgaacgcattgaagagattatccgaactaccgggaaagagaacgcaaagtacctgattgaaaaaatcaagctgcacgatatgcaggagggaaagtgtctgtattctctggaggccatccccctggaggacctgctgaacaatccattcaactacgaggtcgatcatattatccccagaagcgtgtccttcgacaattcctttaacaacaaggtgctggtcaagcaggaagaggcctctaaaaagggcaataggactcctttccagtacctgtctagttcagattccaagatctcttacgaaacctttaaaaagcacattctgaatctggccaaaggaaagggccgcatcagcaagaccaaaaaggagtacctgctggaagagcgggacatcaacagattctccgtccagaaggattttattaaccggaatctggtggacacaagatacgctactcgcggcctgatgaatctgctgcgatcctatttccgggtgaacaatctggatgtgaaagtcaagtccatcaacggcgggttcacatcttttctgaggcgcaaatggaagtttaaaaaggagcgcaacaaagggtacaagcaccatgccgaagatgctctgattatcgcaaatgccgacttcatctttaaggagtggaaaaagctggacaaagccaagaaagtgatggagaaccagatgttcgaagagaagcaggccgaatctatgcccgaaatcgagacagaacaggagtacaaggagattttcatcactcctcaccagatcaagcatatcaaggatttcaaggactacaagtactctcaccgggtggataaaaagcccaacagagagctgatcaatgacaccctgtatagtacaagaaaagacgataaggggaataccctgattgtgaacaatctgaacggactgtacgacaaagataatgacaagctgaaaaagctgatcaacaaaagtcccgagaagctgctgatgtaccaccatgatcctcagacatatcagaaactgaagctgattatggagcagtacggcgacgagaagaacccactgtataagtactatgaagagactgggaactacctgaccaagtatagcaaaaaggataatggccccgtgatcaagaagatcaagtactatgggaacaagctgaatgcccatctggacatcacagacgattaccctaacagtcgcaacaaggtggtcaagctgtcactgaagccatacagattcgatgtctatctggacaacggcgtgtataaatttgtgactgtcaagaatctggatgtcatcaaaaaggagaactactatgaagtgaatagcaagtgctacgaagaggctaaaaagctgaaaaagattagcaaccaggcagagttcatcgcctccttttacaacaacgacctgattaagatcaatggcgaactgtatagggtcatcggggtgaacaatgatctgctgaaccgcattgaagtgaatatgattgacatcacttaccgagagtatctggaaaacatgaatgataagcgcccccctcgaattatcaaaacaattgcctctaagactcagagtatcaaaaagtactcaaccgacattctgggaaacctgtatgaggtgaagagcaaaaagcaccctcagattatcaaaaagggc

SEQ ID NO: 12 - protein, 1082 aa, Neisseria meningitidis
MAAFKPNPINYILGLDIGIASVGWAMVEIDEDENPICLIDLGVRVFERAEVPKTGDSLAMARRLARSVRRLTRRRAHRLLRARRLLKREGVLQAADFDENGLIKSLPNTPWQLRAAALDRKLTPLEWSAVLLHLIKHRGYLSQRKNEGETADKELGALLKGVADNAHALQTGDFRTPAELALNKFEKESGHIRNQRGDYSHTFSRKDLQAELILLFEKQKEFGNPHVSGGLKEGIETLLMTQRPALSGDAVQKMLGHCTFEPAEPKAAKNTYTAERFIWLTKLNNLRILEQGSERPLTDTERATLMDEPYRKSKLTYAQARKLLGLEDTAFFKGLRYGKDNAEASTLMEMKAYHAISRALEKEGLKDKKSPLNLSPELQDEIGTAFSLFKTDEDITGRLKDRIQPEILEALLKHISFDKFVQISLKALRRIVPLMEQGKRYDEACAEIYGDHYGKKNTEEKIYLPPIPADEIRNPVVLRALSQARKVINGVVRRYGSPARIHIETAREVGKSFKDRKEIEKRQEENRKDREKAAAKFREYFPNFVGEPKSKDILKLRLYEQQHGKCLYSGKEINLGRLNEKGYVEIDHALPFSRTWDDSFNNKVLVLGSENQNKGNQTPYEYFNGKDNSREWQEFKARVETSRFPRSKKQRILLQKFDEDGFKERNLNDTRYVNRFLCQFVADRMRLTGKGKKRVFASNGQITNLLRGFWGLRKVRAENDRHHALDAVVVACSTVAMQQKITRFVRYKEMNAFDGKTIDKETGEVLHQKTHFPQPWEFFAQEVMIRVFGKPDGKPEFEEADTPEKLRTLLAEKLSSRPEAVHEYVTPLFVSRAPNRKMSGQGHMETVKSAKRLDEGVSVLRVPLTQLKLKDLEKMVNREREPKLYEALKARLEAHKDDPAKAFAEPFYKYDKAGNRTQQVKAVRVEQVQKTGVWVRNHNGIADNATMVRVDVFEKGDKYYLVPIYSWQVAKGILPDRAVVQGKDEEDWQLIDDSFNFKFSLHPNDLVEVITKKARMFGYFASCHRGTGNINIRIHDLDHKIGKNGILEGIGVKTALSFQKYQIDELGKEIRPCRLKKRPPVR

SEQ ID NO: 13 - DNA, 3249 bp, Neisseria meningitidis
  misc_feature 1..3249: note = Exemplary codon optimized Cas9
  source 1..3249: mol_type = other DNA
atggccgccttcaagcccaaccccatcaactacatcctgggcctggacatcggcatcgccagcgtgggctgggccatggtggagatcgacgaggacgagaaccccatctgcctgatcgacctgggtgtgcgcgtgttcgagcgcgctgaggtgcccaagactggtgacagtctggctatggctcgccggcttgctcgctctgttcggcgccttactcgccggcgcgctcaccgccttctgcgcgctcgccgcctgctgaagcgcgagggtgtgctgcaggctgccgacttcgacgagaacggcctgatcaagagcctgcccaacactccttggcagctgcgcgctgccgctctggaccgcaagctgactcctctggagtggagcgccgtgctgctgcacctgatcaagcaccgcggctacctgagccagcgcaagaacgagggcgagaccgccgacaaggagctgggtgctctgctgaagggcgtggccgacaacgcccacgccctgcagactggtgacttccgcactcctgctgagctggccctgaacaagttcgagaaggagagcggccacatccgcaaccagcgcggcgactacagccacaccttcagccgcaaggacctgcaggccgagctgatcctgctgttcgagaagcagaaggagttcggcaacccccacgtgagcggcggcctgaaggagggcatcgagaccctgctgatgacccagcgccccgccctgagcggcgacgccgtgcagaagatgctgggccactgcaccttcgagccagccgagcccaaggccgccaagaacacctacaccgccgagcgcttcatctggctgaccaagctgaacaacctgcgcatcctggagcagggcagcgagcgccccctgaccgacaccgagcgcgccaccctgatggacgagccctaccgcaagagcaagctgacctacgcccaggcccgcaagctgctgggtctggaggacaccgccttcttcaagggcctgcgctacggcaaggacaacgccgaggccagcaccctgatggagatgaaggcctaccacgccatcagccgcgccctggagaaggagggcctgaaggacaagaagagtcctctgaacctgagccccgagctgcaggacgagatcggcaccgccttcagcctgttcaagaccgacgaggacatcaccggccgcctgaaggaccgcatccagcccgagatcctggaggccctgctgaagcacatcagcttcgacaagttcgtgcagatcagcctgaaggccctgcgccgcatcgtgcccctgatggagcagggcaagcgctacgacgaggcctgcgccgagatctacggcgaccactacggcaagaagaacaccgaggagaagatctacctgcctcctatccccgccgacgagatccgcaaccccgtggtgctgcgcgccctgagccaggcccgcaaggtgatcaacggcgtggtgcgccgctacggcagccccgcccgcatccacatcgagaccgcccgcgaggtgggcaagagcttcaaggaccgcaaggagatcgagaagcgccaggaggagaaccgcaaggaccgcgagaaggccgccgccaagttccgcgagtacttccccaacttcgtgggcgagcccaagagcaaggacatcctgaagctgcgcctgtacgagcagcagcacggcaagtgcctgtacagcggcaaggagatcaacctgggccgcctgaacgagaagggctacgtggagatcgaccacgccctgcccttcagccgcacctgggacgacagcttcaacaacaaggtgctggtgctgggcagcgagaaccagaacaagggcaaccagaccccctacgagtacttcaacggcaaggacaacagccgcgagtggcaggagttcaaggcccgcgtggagaccagccgcttcccccgcagcaagaagcagcgcatcctgctgcagaagttcgacgaggacggcttcaaggagcgcaacctgaacgacacccgctacgtgaaccgcttcctgtgccagttcgtggccgaccgcatgcgcctgaccggcaagggcaagaagcgcgtgttcgccagcaacggccagatcaccaacctgctgcgcggcttctggggcctgcgcaaggtgcgcgccgagaacgaccgccaccacgccctggacgccgtggtggtggcctgcagcaccgtggccatgcagcagaagatcacccgcttcgtgcgctacaaggagatgaacgccttcgacggtaaaaccatcgacaaggagaccggcgaggtgctgcaccagaagacccacttcccccagccctgggagttcttcgcccaggaggtgatgatccgcgtgttcggcaagcccgacggcaagcccgagttcgaggaggccgacacccccgagaagctgcgcaccctgctggccgagaagctgagcagccgccctgaggccgtgcacgagtacgtgactcctctgttcgtgagccgcgcccccaaccgcaagatgagcggtcagggtcacatggagaccgtgaagagcgccaagcgcctggacgagggcgtgagcgtgctgcgcgtgcccctgacccagctgaagctgaaggacctggagaagatggtgaaccgcgagcgcgagcccaagctgtacgaggccctgaaggcccgcctggaggcccacaaggacgaccccgccaaggccttcgccgagcccttctacaagtacgacaaggccggcaaccgcacccagcaggtgaaggccgtgcgcgtggagcaggtgcagaagaccggcgtgtgggtgcgcaaccacaacggcatcgccgacaacgccaccatggtgcgcgtggacgtgttcgagaagggcgacaagtactacctggtgcccatctacagctggcaggtggccaagggcatcctgcccgaccgcgccgtggtgcagggcaaggacgaggaggactggcagctgatcgacgacagcttcaacttcaagttcagcctgcaccccaacgacctggtggaggtgatcaccaagaaggcccgcatgttcggctacttcgccagctgccaccgcggcaccggcaacatcaacatccgcatccacgacctggaccacaagatcggcaagaacggcatcctggagggcatcggcgtgaagaccgccctgagcttccagaagtaccagatcgacgagctgggcaaggagatccgcccctgccgcctgaagaagcgccctcctgtgcgctaa

SEQ ID NO: 14 - protein, 859 aa, synthetic construct
  REGION 1..859: note = Synthetic Cas9 consensus sequence derived from Sm, Sp, St, and Li Cas9 sequences
  VAR_SEQ 4: note = Xaa can be any naturally occurring amino acid
  REGION 8..18: note = misc_feature - N-terminal RuvC-like domain
  VAR_SEQ 21: note = Xaa can be any naturally occurring amino acid
  VAR_SEQ 23: note = Xaa can be any naturally occurring amino acid
  VAR_SEQ 24: note = Xaa can be any naturally occurring amino acid
  VAR_SEQ 26: note = Xaa can be any naturally occurring amino acid
  VAR_SEQ 29..31: note = Each Xaa can independently be any naturally occurring amino acid
  VAR_SEQ 33: note = Xaa can be any naturally occurring amino acid
  VAR_SEQ 36: note = Xaa can be any naturally occurring amino acid
  VAR_SEQ 45: note = Xaa can be any naturally occurring amino acid
  VAR_SEQ 54: note = Xaa can be any naturally occurring amino acid
  VAR_SEQ 63: note = Xaa can be any naturally occurring amino acid
  VAR_SEQ 71: note = Xaa can be any naturally occurring amino acid
  VAR_SEQ 75: note = Xaa can be any naturally occurring amino acid
  VAR_SEQ 76: note = Xaa can be any naturally occurring amino acid
  VAR_SEQ 78..80: note = Each Xaa can independently be any naturally occurring amino acid
  VAR_SEQ 82: note = Xaa can be any naturally occurring amino acid
  VAR_SEQ 84: note = Xaa can be any naturally occurring amino acid
  VAR_SEQ 85: note = Xaa can be any naturally occurring amino acid
  VAR_SEQ 89: note = Xaa can be any naturally occurring amino acid
  VAR_SEQ 90: note = Xaa can be any naturally occurring amino acid
  VAR_SEQ 98: note = Xaa can be any naturally occurring amino acid
  VAR_SEQ 100: note = Xaa can be any naturally occurring amino acid
  VAR_SEQ 106: note = Xaa can be any naturally occurring amino acid
  VAR_SEQ 113: note = Xaa can be any naturally occurring amino acid
  VAR_SEQ 116: note = Xaa can be any naturally occurring amino acid
  VAR_SEQ 125: note = Xaa can be any naturally occurring amino acid
  VAR_SEQ 126: note = Xaa can be any naturally occurring amino acid
  VAR_SEQ 128..133: note = Each Xaa can independently be any naturally occurring amino acid
  VAR_SEQ 135: note = Xaa can be any naturally occurring amino acid
  VAR_SEQ 137: note = Xaa can be any naturally occurring amino acid
  VAR_SEQ 139..147: note = Each Xaa can independently be any naturally occurring amino acid
  VAR_SEQ 153..155: note = Each Xaa can independently be any naturally occurring amino acid
  VAR_SEQ 157: note = Xaa can be any naturally occurring amino acid
  VAR_SEQ 159: note = Xaa can be any naturally occurring amino acid
  VAR_SEQ 161: note = Xaa can be any naturally occurring amino acid
  VAR_SEQ 163: note = Xaa can be any naturally occurring amino acid
  VAR_SEQ 166..168: note = Each Xaa can independently be any naturally occurring amino acid
  VAR_SEQ 170: note = Xaa can be any naturally occurring amino acid
  VAR_SEQ 171: note = Xaa can be any naturally occurring amino acid
  VAR_SEQ 173..175: note = Each Xaa can independently be any naturally occurring amino acid
  VAR_SEQ 177: note = Xaa can be any naturally occurring amino acid
  VAR_SEQ 183: note = Xaa can be any naturally occurring amino acid
  VAR_SEQ 185..187: note = Each Xaa can independently be any naturally occurring amino acid
  VAR_SEQ 189: note = Xaa can be any naturally occurring amino acid
  VAR_SEQ 192..195: note = Each Xaa can independently be any naturally occurring amino acid
  VAR_SEQ 198: note = Xaa can be any naturally occurring amino acid
  VAR_SEQ 199: note = Xaa can be any naturally occurring amino acid
  VAR_SEQ 202: note = Xaa can be any naturally occurring amino acid
  VAR_SEQ 206: note = Xaa can be any naturally occurring amino acid
  VAR_SEQ 207: note = Xaa can be any naturally occurring amino acid
  VAR_SEQ 210: note = Xaa can be any naturally occurring amino acid
  VAR_SEQ 212: note = Xaa can be any naturally occurring amino acid
  VAR_SEQ 213: note = Xaa can be any naturally occurring amino acid
  VAR_SEQ 219: note = Xaa can be any naturally occurring amino acid
  VAR_SEQ 220: note = Xaa can be any naturally occurring amino acid
  VAR_SEQ 222: note = Xaa can be any naturally occurring amino acid
  VAR_SEQ 224: note = Xaa can be any naturally occurring amino acid
  VAR_SEQ 226: note = Xaa can be any naturally occurring amino acid
  VAR_SEQ 236: note = Xaa can be any naturally occurring amino acid
  VAR_SEQ 240: note = Xaa can be any naturally occurring amino acid
  VAR_SEQ 241: note = Xaa can be any naturally occurring amino acid
  VAR_SEQ 244..246: note = Each Xaa can independently be any naturally occurring amino acid
  VAR_SEQ 248: note = Xaa can be any naturally occurring amino acid
  VAR_SEQ 249: note = Xaa can be any naturally occurring amino acid
  VAR_SEQ 250: note = Xaa can be any naturally occurring amino acid
  VAR_SEQ 252..254: note = Each Xaa can independently be any naturally occurring amino acid
  VAR_SEQ 256: note = Xaa can be any naturally occurring amino acid
  VAR_SEQ 257: note = Xaa can be any naturally occurring amino acid
  VAR_SEQ 268: note = Xaa can be any naturally occurring amino acid
  VAR_SEQ 271: note = Xaa can be any naturally occurring amino acid
  VAR_SEQ 273: note = Xaa can be any naturally occurring amino acid
  VAR_SEQ 277: note = Xaa can be any naturally occurring amino acid
  VAR_SEQ 280: note = Xaa can be any naturally occurring amino acid
  VAR_SEQ 281: note = Xaa can be any naturally occurring amino acid
  VAR_SEQ 283: note = Xaa can be any naturally occurring amino acid
  VAR_SEQ 289: note = Xaa can be any naturally occurring amino acid
  VAR_SEQ 290: note = Xaa can be any naturally occurring amino acid
  VAR_SEQ 292..294: note = Each Xaa can independently be any naturally occurring amino acid
  VAR_SEQ 301: note = Xaa can be any naturally occurring amino acid
  VAR_SEQ 308: note = Xaa can be any naturally occurring amino acid
  VAR_SEQ 319..322: note = Each Xaa can independently be any naturally occurring amino acid
  VAR_SEQ 328: note = Xaa can be any naturally occurring amino acid
  VAR_SEQ 329: note = Xaa can be any naturally occurring amino acid
  VAR_SEQ 335..337: note = Each Xaa can independently be any naturally occurring amino acid
  VAR_SEQ 346: note = Xaa can be any naturally occurring amino acid
  VAR_SEQ 347: note = Xaa can be any naturally occurring amino acid
  VAR_SEQ 356..361: note = Each Xaa can independently be any naturally occurring amino acid
  VAR_SEQ 363: note = Xaa can be any naturally occurring amino acid
  VAR_SEQ 370..373: note = Each Xaa can independently be any naturally occurring amino acid
  VAR_SEQ 375: note = Xaa can be any naturally occurring amino acid
  VAR_SEQ 376: note = Xaa can be any naturally occurring amino acid
  VAR_SEQ 379: note = Xaa can be any naturally occurring amino acid
  VAR_SEQ 386..390: note = Each Xaa can independently be any naturally occurring amino acid
  VAR_SEQ 393: note = Xaa can be any naturally occurring amino acid
  VAR_SEQ 395: note = Xaa can be any naturally occurring amino acid
  VAR_SEQ 396: note = Xaa can be any naturally occurring amino acid
  VAR_SEQ 398: note = Xaa can be any naturally occurring amino acid
  VAR_SEQ 400: note = Xaa can be any naturally occurring amino acid
  VAR_SEQ 403: note = Xaa can be any naturally occurring amino acid
  VAR_SEQ 407: note = Xaa can be any naturally occurring amino acid
  VAR_SEQ 410: note = Xaa can be any naturally occurring amino acid
  VAR_SEQ 411: note = Xaa can be any naturally occurring amino acid
  VAR_SEQ 413..416: note = Each Xaa can independently be any naturally occurring amino acid
  VAR_SEQ 418: note = Xaa can be any naturally occurring amino acid
  VAR_SEQ 422: note = Xaa can be any naturally occurring amino acid
  VAR_SEQ 428: note = Xaa can be any naturally occurring amino acid
  VAR_SEQ 431: note = Xaa can be any naturally occurring amino acid
  VAR_SEQ 433: note = Xaa can be any naturally occurring amino acid
  VAR_SEQ 437..439: note = Each Xaa can independently be any naturally occurring amino acid
  VAR_SEQ 445: note = Xaa can be any naturally occurring amino acid
  VAR_SEQ 451: note = Xaa can be any naturally occurring amino acid
  VAR_SEQ 456: note = Xaa can be any naturally occurring amino acid
  VAR_SEQ 459: note = Xaa can be any naturally occurring amino acid
  VAR_SEQ 465..469: note = Each Xaa can independently be any naturally occurring amino acid
  VAR_SEQ 481: note = Xaa can be any naturally occurring amino acid
  VAR_SEQ 482: note = Xaa can be any naturally occurring amino acid
  VAR_SEQ 484: note = Xaa can be any naturally occurring amino acid
  VAR_SEQ 490: note = Xaa can be any naturally occurring amino acid
  VAR_SEQ 494: note = Xaa can be any naturally occurring amino acid
  REGION 495..502: note = misc_feature - RuvC-like domain
  VAR_SEQ 497: note = Xaa can be any naturally occurring amino acid
  VAR_SEQ 506: note = Xaa can be any naturally occurring amino acid
  VAR_SEQ 510: note = Xaa can be any naturally occurring amino acid
  VAR_SEQ 513: note = Xaa can be any naturally occurring amino acid
  VAR_SEQ 514: note = Xaa can be any naturally occurring amino acid
  VAR_SEQ 517: note = Xaa can be any naturally occurring amino acid
  VAR_SEQ 520: note = Xaa can be any naturally occurring amino acid
  VAR_SEQ 525: note = Xaa can be any naturally occurring amino acid
  VAR_SEQ 526: note = Xaa can be any naturally occurring amino acid
  VAR_SEQ 529: note = Xaa can be any naturally occurring amino acid
  VAR_SEQ 531: note = Xaa can be any naturally occurring amino acid
  VAR_SEQ 532: note = Xaa can be any naturally occurring amino acid
  VAR_SEQ 534: note = Xaa can be any naturally occurring amino acid
  VAR_SEQ 542: note = Xaa can be any naturally occurring amino acid
  VAR_SEQ 546: note = Xaa can be any naturally occurring amino acid
  VAR_SEQ 547: note = Xaa can be any naturally occurring amino acid
  VAR_SEQ 553: note = Xaa can be any naturally occurring amino acid
  REGION 555..575: note = misc_feature - HNH-like domain
  VAR_SEQ 556: note = Xaa can be any naturally occurring amino acid
  VAR_SEQ 560: note = Xaa can be any naturally occurring amino acid
  VAR_SEQ 563: note = Xaa can be any naturally occurring amino acid
  VAR_SEQ 565: note = Xaa can be any naturally occurring amino acid
  VAR_SEQ 567: note = Xaa can be any naturally occurring amino acid
  VAR_SEQ 579: note = Xaa can be any naturally occurring amino acid
  VAR_SEQ 582: note = Xaa can be any naturally occurring amino acid
  VAR_SEQ 583: note = Xaa can be any naturally occurring amino acid
  VAR_SEQ 585: note = Xaa can be any naturally occurring amino acid
  VAR_SEQ 588: note = Xaa can be any naturally occurring amino acid
  VAR_SEQ 590: note = Xaa can be any naturally occurring amino acid
  VAR_SEQ 592: note = Xaa can be any naturally occurring amino acid
  VAR_SEQ 594..596: note = Each Xaa can independently be any naturally occurring amino acid
  VAR_SEQ 610: note = Xaa can be any naturally occurring amino acid
  VAR_SEQ 616: note = Xaa can be any naturally occurring amino acid
  VAR_SEQ 628: note = Xaa can be any naturally occurring amino acid
  VAR_SEQ 631: note = Xaa can be any naturally occurring amino acid
  VAR_SEQ 633: note = Xaa can be any naturally occurring amino acid
  VAR_SEQ 634: note = Xaa can be any naturally occurring amino acid
  VAR_SEQ 636: note = Xaa can be any naturally occurring amino acid
  VAR_SEQ 638..641: note = Each Xaa can independently be any naturally occurring amino acid
  VAR_SEQ 643..645: note = Each Xaa can independently be any naturally occurring amino acid
  VAR_SEQ 653: note = Xaa can be any naturally occurring amino acid
  VAR_SEQ 657: note = Xaa can be any naturally occurring amino acid
  VAR_SEQ 659: note = Xaa can be any naturally occurring amino acid
  VAR_SEQ 660: note = Xaa can be any naturally occurring amino acid
  VAR_SEQ 665: note = Xaa can be any naturally occurring amino acid
  VAR_SEQ 666: note = Xaa can be any naturally occurring amino acid
  VAR_SEQ 668: note = Xaa can be any naturally occurring amino acid
  VAR_SEQ 669: note = Xaa can be any naturally occurring amino acid
  REGION 670..677: note = misc_feature - RuvC-like domain
  VAR_SEQ 680: note = Xaa can be any naturally occurring amino acid
  VAR_SEQ 681: note = Xaa can be any naturally occurring amino acid
  VAR_SEQ 683: note = Xaa can be any naturally occurring amino acid
  VAR_SEQ 686: note = Xaa can be any naturally occurring amino acid
  VAR_SEQ 696: note = Xaa can be any naturally occurring amino acid
  VAR_SEQ 697: note = Xaa can be any naturally occurring amino acid
  VAR_SEQ 704: note = Xaa can be any naturally occurring amino acid
  VAR_SEQ 708: note = Xaa can be any naturally occurring amino acid
  VAR_SEQ 710: note = Xaa can be any naturally occurring amino acid
  VAR_SEQ 711: note = Xaa can be any naturally occurring amino acid
  VAR_SEQ 714: note = Xaa can be any naturally occurring amino acid
  VAR_SEQ 717..720: note = Each Xaa can independently be any naturally occurring amino acid
  VAR_SEQ 722: note = Xaa can be any naturally occurring amino acid
  VAR_SEQ 725: note = Xaa can be any naturally occurring amino acid
  VAR_SEQ 727: note = Xaa can be any naturally occurring amino acid
  VAR_SEQ 733..735: note = Each Xaa can independently be any naturally occurring amino acid
  VAR_SEQ 740: note = Xaa can be any naturally occurring amino acid
  VAR_SEQ 742: note = Xaa can be any naturally occurring amino acid
  VAR_SEQ 749..754: note = Each Xaa can independently be any naturally occurring amino acid
  VAR_SEQ 758..761: note = Each Xaa can independently be any naturally occurring amino acid
  VAR_SEQ 763..768: note = Each Xaa can independently be any naturally occurring amino acid
  VAR_SEQ 771: note = Xaa can be any naturally occurring amino acid
  VAR_SEQ 774..777: note = Each Xaa can independently be any naturally occurring amino acid
  VAR_SEQ 782: note = Xaa can be any naturally occurring amino acid
  VAR_SEQ 784..786: note = Each Xaa can independently be any naturally occurring amino acid
  VAR_SEQ 788: note = Xaa can be any naturally occurring amino acid
  VAR_SEQ 790: note = Xaa can be any naturally occurring amino acid
  VAR_SEQ 795: note = Xaa can be any naturally occurring amino acid
  VAR_SEQ 799: note = Xaa can be any naturally occurring amino acid
  VAR_SEQ 801: note = Xaa can be any naturally occurring amino acid
  VAR_SEQ 802: note = Xaa can be any naturally occurring amino acid
  VAR_SEQ 804: note = Xaa can be any naturally occurring amino acid
  VAR_SEQ 806..813: note = Each Xaa can independently be any naturally occurring amino acid
  VAR_SEQ 815..818: note = Each Xaa can independently be any naturally occurring amino acid
  VAR_SEQ 820: note = Xaa can be any naturally occurring amino acid
  VAR_SEQ 823..827: note = Each Xaa can independently be any naturally occurring amino acid
  VAR_SEQ 829: note = Xaa can be any naturally occurring amino acid
  VAR_SEQ 830: note = Xaa can be any naturally occurring amino acid
  VAR_SEQ 832: note = Xaa can be any naturally occurring amino acid
  VAR_SEQ 835..837: note = Each Xaa can independently be any naturally occurring amino acid
  VAR_SEQ 842..844: note = Each Xaa can independently be any naturally occurring amino acid
  VAR_SEQ 846: note = Xaa can be any naturally occurring amino acid
  VAR_SEQ 848: note = Xaa can be any naturally occurring amino acid
  VAR_SEQ 851: note = Xaa can be any naturally occurring amino acid
  VAR_SEQ 857: note = Xaa can be any naturally occurring amino acid
  VAR_SEQ 857: note = Xaa can be any naturally occurring amino acid
MKYXIGLDIGTNSVGWAVTDXYXXKXKGXXXIXKNXGLFDGTARXRTARRRRRXNRIYLQIFXEMDFFRLXSFVXXKXXXPXFXXEYHXXPTIYHLRXLXKDLRLXYLALAHXIKXRGNFLIEGXXNXXXXXXYXFXIXXXXXXXXXPEKGFXXXLXGXFXFXLEXXXKXXYXXXLXLLIGDXYXXXFXAKXXXXLSXXVTXALSXXMIXRXXHDLLKXXYXEXFXKGYAGYIDGXQFYXXKLXXXGXXXKXXXEXXLRKQRTFDNGXIPXQXHLEXAIXXQXYPFLNXXIXXXTFRIPYXVGPLAGXSFAWRKIPWNXXXXDSAFIXXMTDLPXXXVLPKHSLYXXVYNELTKVXXXXXXKXIFKRKVXXXXGXXFNXSTYHDLXXXXXLDXNXXEXIXLTXFEDXMIXXLXXXXKXLRRXYTGWGXLSXLXGIRXXXSTILDXLDNRNXMQLIXDLXFKIKQXXXXXGSPAIKKGILQXXKXVDELVXMGPXIVXEMARENQTXGNSXRKXXKEXGSXILKEXXNLXNXXLXLYYLQNGXDMYXXLDILSXYDXDHIXPQXFXDXSIDNVLSNRKDXVPXXVXKKXWXLXLXXXRKFDLTKAERGGLXDKAFIXRQLVETRQITKXVAXLXXNXDXXXXVXXXTLKSLVSXFRKXFXXLYKVXXNXXHHAHDAYLNVXXLXYPXLEEFVYGDYXXKATKFYXNIMXFXXGEXWKXXXXVXMQXNXVKKEQXXXPKNSXLXKDKYGGXXXXXXKGKXXXXIXXXXXXFLXGYXXXXLPKYXLXXXGXRXLASEXKGNXLXXLXAXXXXXXXXEXXXXFXANXXXXXLXXGXAFXXXIRRYXXXTXIXQSXTGLYEXRL

SEQ ID NO: 15 - protein, 8 aa, synthetic construct
  REGION 1..8: note = RuvC-like domain
  VARIANT 2: note = Xaa is Val or His
  VARIANT 3: note = Xaa is Ile, Leu, or Val
  VARIANT 5: note = Xaa is Met or Thr
IXXEXARE

SEQ ID NO: 16 - protein, 8 aa, synthetic construct
  REGION 1..8: note = RuvC-like domain
  VARIANT 3: note = Xaa is Ile, Leu, or Val
IVXEMARE

SEQ ID NO: 17 - protein, 8 aa, synthetic construct
  REGION 1..8: note = RuvC-like domain
  VARIANT 4: note = Xaa is His or Leu
  VARIANT 7: note = Xaa is Arg or Val
  VARIANT 8: note = Xaa is Glu or Val
HHAXDAXX

SEQ ID NO: 18 - protein, 8 aa, synthetic construct
  REGION 1..8: note = RuvC-like domain
HHAHDAYL

SEQ ID NO: 19 - protein, 30 aa, synthetic construct
  REGION 1..30: note = N-terminal RuvC-like domain
  VARIANT 2: note = Xaa is Lys or Pro
  VARIANT 4: note = Xaa is Val, Leu, Ile, or Phe
  VARIANT 5: note = Xaa is Gly, Ala, or Ser
  VARIANT 6: note = Xaa is Leu, Ile, Val, or Phe
  MOD_RES 7..26: note = N-terminal RuvC-like domain, each Xaa can be any amino acid or absent, region may encompass 5-20 residues
  VARIANT 29: note = Xaa is Asp, Glu, Asn, or Gln
KXYXXXXXXXXXXXXXXXXXXXXXXXTDXY

SEQ ID NO: 20 - skipped

SEQ ID NO: 21 - protein, 12 aa, synthetic construct
  REGION 1..12: note = N-terminal RuvC-like domain
  VARIANT 2: note = Xaa is Ile, Val, Met, Leu, or Thr
  VARIANT 4: note = Xaa is Thr, Ile, Val, Ser, Asn, Tyr, Glu, or Leu
  VARIANT 5: note = Xaa is Asn, Ser, Gly, Ala, Asp, Thr, Arg, Met, or Phe
  VARIANT 7: note = Xaa is Val, Ile, Leu, Cys, Thr, or Phe
  VARIANT 9: note = Xaa is Trp, Phe, Val, Tyr, Ser, or Leu
  VARIANT 10: note = Xaa is Ala, Ser, Cys, Val, or Gly
  VARIANT 11: note = Xaa is Val, Ile, Leu, Ala, Met, or His
  VARIANT 12: note = Any amino acid or absent
DXGXXSXGXXXX

SEQ ID NO: 22 - protein, 12 aa, synthetic construct
  REGION 1..12: note = N-terminal RuvC-like domain
  VARIANT 4: note = Xaa is Thr, Ile, Val, Ser, Asn, Tyr, Glu, or Leu
  VARIANT 5: note = Xaa is Asn, Ser, Gly, Ala, Asp, Thr, Arg, Met, or Phe
  VARIANT 11: note = Xaa is Val, Ile, Leu, Ala, Met, or His
  VARIANT 12: note = Any amino acid or absent
DIGXXSVGWAXX

SEQ ID NO: 23 - protein, 12 aa, synthetic construct
  REGION 1..12: note = N-terminal RuvC-like domain
  MOD_RES 12: note = Any non-polar alkyl amino acid or a hydroxyl amino acid
DIGTNSVGWAVX

SEQ ID NO: 24 - protein, 73 aa, synthetic construct
  REGION 1..73: note = HNH-like domain
  VARIANT 8: note = Xaa is Lys or Arg
  VARIANT 12: note = Xaa is Val or Thr
  VARIANT 13: note = Xaa is Gly or Asp
  VARIANT 14: note = Xaa is Glu, Gln, or Asp
  VARIANT 15: note = Xaa is Glu or Asp
  VARIANT 19: note = Xaa is Asp, Asn, or His
  VARIANT 20: note = Xaa is Tyr, Arg, or Asn
  VARIANT 23: note = Xaa is Gln, Asp, or Asn
  MOD_RES 25..64: note = HNH-like domain, each Xaa can be any amino acid or absent, region may encompass 15-40 residues
  VARIANT 67: note = Xaa is Gly or Glu
  VARIANT 69: note = Xaa is Ser or Gly
  VARIANT 71: note = Xaa is Asp or Asn
LYYLQNGXDMYXXXXLDIXXLSXYXXXXXXXXXXXXXXXXXXXXXXXXXXXXXXXXXXXXXXXXNRXKXDXVP

SEQ ID NO: 25 - protein, 27 aa, synthetic construct
  REGION 1..27: note = HNH-like domain
  VARIANT 1: note = Xaa is Asp, Glu, Gln, or Asn
  VARIANT 2: note = Xaa is Leu, Ile, Arg, Gln, Val, Met, or Lys
  VARIANT 3: note = Xaa is Asp or Glu
  VARIANT 5: note = Xaa is Ile, Val, Thr, Ala, or Leu
  VARIANT 6: note = Xaa is Val, Tyr, Ile, Leu, Phe, or Trp
  VARIANT 8: note = Xaa is Gln, His, Arg, Lys, Tyr, Ile, Leu, Phe, or Trp
  VARIANT 9: note = Xaa is Ser, Ala, Asp, Thr, or Lys
  VARIANT 10: note = Xaa is Phe, Leu, Val, Lys, Tyr, Met, Ile, Arg, Ala, Glu, Asp, or Gln
  VARIANT 11: note = Xaa is Leu, Arg, Thr, Ile, Val, Ser, Cys, Tyr, Lys, Phe, or Gly
  VARIANT 12: note = Xaa is Lys, Gln, Tyr, Thr, Phe, Leu, Trp, Met, Ala, Glu, Gly, or Ser
  VARIANT 13: note = Xaa is Asp, Ser, Asn, Arg, Leu, or Thr
  VARIANT 14: note = Xaa is Asp, Asn, or Ser
  VARIANT 15: note = Xaa is Ser, Ala, Thr, Gly, or Arg
  VARIANT 16: note = Xaa is Ile, Leu, Phe, Ser, Arg, Tyr, Gln, Trp, Asp, Lys, or His
  VARIANT 17: note = Xaa is Asp, Ser, Ile, Asn, Glu, Ala, His, Phe, Leu, Gln, Met, Gly, Tyr, or Val
  VARIANT 19: note = Xaa is Lys, Leu, Arg, Met, Thr, or Phe
  VARIANT 20: note = Xaa is Val, Leu, Ile, Ala, or Thr
  VARIANT 21: note = Xaa is Leu, Ile, Val, or Ala
  VARIANT 22: note = Xaa is Thr, Val, Cys, Glu, Ser, or Ala
  VARIANT 23: note = Xaa is Arg, Phe, Thr, Trp, Glu, Leu, Asn, Cys, Lys, Val, Ser, Gln, Ile, Tyr, His, or Ala
  VARIANT 24: note = Xaa is Ser, Pro, Arg, Lys, Asn, Ala, His, Gln, Gly, or Leu
  VARIANT 25: note = Xaa is Asp, Gly, Thr, Asn, Ser, Lys, Ala, Ile, Glu, Leu, Gln, Arg, or Tyr
  VARIANT 26: note = Xaa is Lys, Val, Ala, Glu, Tyr, Ile, Cys, Leu, Ser, Thr, Gly, Lys, Met, Asp, or Phe
XXXHXXPXXXXXXXXXXNXXXXXXXXN

SEQ ID NO: 26 - protein, 27 aa, synthetic construct
  REGION 1..27: note = HNH-like domain
  VARIANT 1: note = Xaa is Asp or Glu
  VARIANT 2: note = Xaa is Leu, Ile, Arg, Gln, Val, Met, or Lys
  VARIANT 3: note = Xaa is Asp or Glu
  VARIANT 5: note = Xaa is Ile, Val, Thr, Ala, or Leu
  VARIANT 6: note = Xaa is Val, Tyr, Ile, Leu, Phe, or Trp
  VARIANT 8: note = Xaa is Gln, His, Arg, Lys, Tyr, Ile, Leu, Phe, or Trp
  VARIANT 10: note = Xaa is Phe, Leu, Val, Lys, Tyr, Met, Ile, Arg, Ala, Glu, Asp, or Gln
  VARIANT 11: note = Xaa is Leu, Arg, Thr, Ile, Val, Ser, Cys, Tyr, Lys, Phe, or Gly
  VARIANT 12: note = Xaa is Lys, Gln, Tyr, Thr, Phe, Leu, Trp, Met, Ala, Glu, Gly, or Ser
  VARIANT 16: note = Xaa is Ile, Leu, Phe, Ser, Arg, Tyr, Gln, Trp, Asp, Lys, or His
  VARIANT 17: note = Xaa is Asp, Ser, Ile, Asn, Glu, Ala, His, Phe, Leu, Gln, Met, Gly, Tyr, or Val
  VARIANT 22: note = Xaa is Thr, Val, Cys, Glu, Ser, or Ala
  VARIANT 23: note = Xaa is Arg, Phe, Thr, Trp, Glu, Leu, Asn, Cys, Lys, Val, Ser, Gln, Ile, Tyr, His, or Ala
  VARIANT 24: note = Xaa is Ser, Pro, Arg, Lys, Asn, Ala, His, Gln, Gly, or Leu
  VARIANT 25: note = Xaa is Asp, Gly, Thr, Asn, Ser, Lys, Ala, Ile, Glu, Leu, Gln, Arg, or Tyr
  VARIANT 26: note = Xaa is Lys, Val, Ala, Glu, Tyr, Ile, Cys, Leu, Ser, Thr, Gly, Lys, Met, Asp, or Phe
XXXHXXPXSXXXDDSXXNKVLXXXXXN

SEQ ID NO: 27 - protein, 27 aa, synthetic construct
  REGION 1..27: note = HNH-like domain
  VARIANT 1: note = Xaa is Asp or Glu
  VARIANT 3: note = Xaa is Asp or Glu
  VARIANT 8: note = Xaa is Gln, His, Arg, Lys, Tyr, Ile, Leu, or Trp
  VARIANT 10: note = Xaa is Phe, Leu, Val, Lys, Tyr, Met, Ile, Arg, Ala, Glu, Asp, or Gln
  VARIANT 11: note = Xaa is Leu, Arg, Thr, Ile, Val, Ser, Cys, Tyr, Lys, Phe, or Gly
  VARIANT 12: note = Xaa is Lys, Gln, Tyr, Thr, Phe, Leu, Trp, Met, Ala, Glu, Gly, or Ser
  VARIANT 16: note = Xaa is Ile, Leu, Phe, Ser, Arg, Tyr, Gln, Trp, Asp, Lys, or His
  VARIANT 17: note = Xaa is Asp, Ser, Ile, Asn, Glu, Ala, His, Phe, Leu, Gln, Met, Gly, Tyr, or Val
  VARIANT 23: note = Xaa is Arg, Phe, Thr, Trp, Glu, Leu, Asn, Cys, Lys, Val, Ser, Gln, Ile, Tyr, His, or Ala
  VARIANT 24: note = Xaa is Ser, Pro, Arg, Lys, Asn, Ala, His, Gln, Gly, or Leu
  VARIANT 25: note = Xaa is Asp, Gly, Thr, Asn, Ser, Lys, Ala, Ile, Glu, Leu, Gln, Arg, or Tyr
  VARIANT 26: note = Xaa is Lys, Val, Ala, Glu, Tyr, Ile, Cys, Leu, Ser, Thr, Gly, Lys, Met, Asp, or Phe
XVXHIVPXSXXXDDSXXNKVLTXXXXN

SEQ ID NO: 28 - protein, 27 aa, synthetic construct
  REGION 1..27: note = HNH-like domain
  VARIANT 2: note = Xaa is Ile or Val
  VARIANT 6: note = Xaa is Ile or Val
  VARIANT 9: note = Xaa is Ala or Ser
  VARIANT 11: note = Xaa is Ile or Leu
  VARIANT 12: note = Xaa is Lys or Thr
  VARIANT 14: note = Xaa is Asp or Asn
  VARIANT 19: note = Xaa is Arg, Lys, or Leu
  VARIANT 22: note = Xaa is Thr or Val
  VARIANT 23: note = Xaa is Ser or Arg
  VARIANT 25: note = Xaa is Lys, Asp, or Ala
  VARIANT 26: note = Xaa is Glu, Lys, Gly, or Asn
DXDHIXPQXFXXDXSIDNXVLXXSXXN

SEQ ID NO: 29 - RNA, 116 nt, synthetic construct
  misc_feature 1..116: note = gRNA
  misc_difference 1..20: note = a, c, u, g, unknown or other
  misc_feature 1..20: note = targeting region
  misc_feature 21..42: note = first complementarity domain
  misc_feature 43..46: note = linking domain
  misc_feature 47..70: note = second complementarity domain
  source 1..116: mol_type = other RNA
nnnnnnnnnnnnnnnnnnnngttttagagctatgctgttttggaaacaaaacagcatagcaagttaaaataaggctagtccgttatcaacttgaaaaagtggcaccgagtcggtgc

SEQ ID NO: 30 - RNA, 116 nt, synthetic construct
  misc_feature 1..116: note = gRNA
  misc_difference 1..20: note = a, c, u, g, unknown or other
  misc_feature 1..20: note = targeting region
  misc_feature 21..42: note = first complementarity domain
  misc_feature 43..46: note = linking domain
  misc_feature 47..70: note = second complementarity domain
  source 1..116: mol_type = other RNA
nnnnnnnnnnnnnnnnnnnngtattagagctatgctgtattggaaacaatacagcatagcaagttaatataaggctagtccgttatcaacttgaaaaagtggcaccgagtcggtgc

SEQ ID NO: 31 - RNA, 96 nt, synthetic construct
  misc_feature 1..96: note = gRNA
  misc_difference 1..20: note = a, c, u, g, unknown or other
  misc_feature 1..20: note = targeting domain
  misc_feature 21..32: note = first complementarity domain
  misc_feature 33..36: note = linking domain
  misc_feature 37..50: note = second complementarity domain
  misc_feature 51..62: note = proximal domain
  source 1..96: mol_type = other RNA
nnnnnnnnnnnnnnnnnnnngtttaagagctagaaatagcaagtttaaataaggctagtccgttatcaacttgaaaaagtggcaccgagtcggtgc

SEQ ID NO: 32 - RNA, 47 nt, synthetic construct
  misc_feature 1..47: note = gRNA proximal and tail domains derived from S. pyogenes
  source 1..47: mol_type = other RNA
aaggctagtccgttatcaacttgaaaaagtggcaccgagtcggtgct

SEQ ID NO: 33 - RNA, 49 nt, synthetic construct
  misc_feature 1..49: note = gRNA proximal and tail domains
  source 1..49: mol_type = other RNA
aaggctagtccgttatcaacttgaaaaagtggcaccgagtcggtggtgc

SEQ ID NO: 34 - RNA, 51 nt, synthetic construct
  misc_feature 1..51: note = gRNA proximal and tail domains
  source 1..51: mol_type = other RNA
aaggctagtccgttatcaacttgaaaaagtggcaccgagtcggtgcggatc

SEQ ID NO: 35 - RNA, 31 nt, synthetic construct
  misc_feature 1..31: note = gRNA proximal and tail domains
  source 1..31: mol_type = other RNA
aaggctagtccgttatcaacttgaaaaagtg

SEQ ID NO: 36 - RNA, 18 nt, synthetic construct
  misc_feature 1..18: note = gRNA proximal and tail domains
  source 1..18: mol_type = other RNA
aaggctagtccgttatca

SEQ ID NO: 37 - RNA, 12 nt, synthetic construct
  misc_feature 1..12: note = gRNA proximal and tail domains
  source 1..12: mol_type = other RNA
aaggctagtccg

SEQ ID NO: 38 - RNA, 102 nt, synthetic construct
  misc_feature 1..102: note = Unimolecular gRNA derived from S. aureus
  misc_difference 1..20: note = n is a, c, g, or u
  misc_feature 1..20: note = Targeting domain
  source 1..102: mol_type = other RNA
nnnnnnnnnnnnnnnnnnnngttttagtactctggaaacagaatctactaaaacaaggcaaaatgccgtgtttatctcgtcaacttgttggcgagatttttt

SEQ ID NO: 39 - RNA, 42 nt, synthetic construct
  misc_feature 1..42: note = Modular gRNA derived from S. pyogenes
  misc_difference 1..20: note = a, c, u, g, unknown or other
  misc_feature 1..20: note = Targeting domain
  misc_feature 21..42: note = First complementarity domain
  source 1..42: mol_type = other RNA
nnnnnnnnnnnnnnnnnnnngttttagagctatgctgttttg

SEQ ID NO: 40 - RNA, 85 nt, synthetic construct
  misc_feature 1..85: note = Modular gRNA derived from S. pyogenes
  misc_feature 1..9: note = 5' extension domain
  misc_feature 10..33: note = Second complementarity domain
  misc_feature 34..45: note = Proximal domain
  misc_feature 46..85: note = Tail domain
  source 1..85: mol_type = other RNA
ggaaccattcaaaacagcatagcaagttaaaataaggctagtccgttatcaacttgaaaaagtggcaccgagtcggtgctttttt

SEQ ID NO: 41 - RNA, 62 nt, synthetic construct
  misc_feature 1..62: note = Unimolecular gRNA derived from S. pyogenes
  misc_difference 1..20: note = a, c, u, g, unknown or other
  misc_feature 1..20: note = Targeting domain
  misc_feature 21..32: note = First complementarity domain
  misc_feature 33..36: note = Linking domain
  misc_feature 37..50: note = Second complementarity domain
  misc_feature 51..62: note = Proximal domain
  source 1..62: mol_type = other RNA
nnnnnnnnnnnnnnnnnnnngttttagagctagaaatagcaagttaaaataaggctagtccg

SEQ ID NO: 42 - RNA, 102 nt, synthetic construct
  misc_feature 1..102: note = Unimolecular gRNA derived from S. pyogenes
  misc_difference 1..20: note = a, c, u, g, unknown or other
  misc_feature 1..20: note = Targeting domain
  misc_feature 21..32: note = First complementarity domain
  misc_feature 33..36: note = Linking domain
  misc_feature 37..50: note = Second complementarity domain
  misc_feature 51..62: note = Proximal domain
  misc_feature 63..102: note = Tail domain
  source 1..102: mol_type = other RNA
nnnnnnnnnnnnnnnnnnnngttttagagctagaaatagcaagttaaaataaggctagtccgttatcaacttgaaaaagtggcaccgagtcggtgctttttt

SEQ ID NO: 43 - RNA, 75 nt, synthetic construct
  misc_feature 1..75: note = Unimolecular gRNA derived from S. pyogenes
  misc_feature 1..20: note = Targeting domain
  misc_difference 1..20: note = a, c, u, g, unknown or other
  misc_feature 21..36: note = First complementarity domain
  misc_feature 37..40: note = Linking domain
  misc_feature 41..58: note = Second complementarity domain
  misc_feature 59..70: note = Proximal domain
  misc_feature 71..75: note = Tail domain
  source 1..75: mol_type = other RNA
nnnnnnnnnnnnnnnnnnnngttttagagctatgctgaaaagcatagcaagttaaaataaggctagtccgttatc

SEQ ID NO: 44 - RNA, 87 nt, synthetic construct
  misc_feature 1..87: note = Unimolecular gRNA derived from S. pyogenes
  misc_difference 1..20: note = a, c, u, g, unknown or other
  misc_feature 1..20: note = Targeting domain
  misc_feature 21..32: note = First complementarity domain
  misc_feature 43..46: note = Linking domain
  misc_feature 57..70: note = Second complementarity domain
  misc_feature 71..82: note = Proximal domain
  misc_feature 83..87: note = Tail domain
  source 1..87: mol_type = other RNA
nnnnnnnnnnnnnnnnnnnngttttagagctatgctgttttggaaacaaaacagcatagcaagttaaaataaggctagtccgttatc

SEQ ID NO: 45 - RNA, 42 nt, synthetic construct
  misc_feature 1..42: note = Modular gRNA derived from S. thermophilus
  misc_difference 1..20: note = a, c, u, g, unknown or other
  misc_feature 1..20: note = Targeting domain
  misc_feature 21..42: note = First complementarity domain
  source 1..42: mol_type = other RNA
nnnnnnnnnnnnnnnnnnnngttttagagctgtgttgtttcg

SEQ ID NO: 46 - RNA, 78 nt, synthetic construct
  misc_feature 1..78: note = Modular gRNA derived from S. thermophilus
  misc_feature 1..3: note = 5' extension domain
  misc_feature 4..27: note = Second complementarity domain
  misc_feature 28..40: note = Proximal domain
  misc_feature 41..78: note = Tail domain
  source 1..78: mol_type = other RNA
gggcgaaacaacacagcgagttaaaataaggcttagtccgtactcaacttgaaaaggtggcaccgattcggtgttttt

SEQ ID NO: 47 - RNA, 85 nt, synthetic construct
  misc_feature 1..85: note = Modular gRNA derived from S. pyogenes
  source 1..85: mol_type = other RNA
gaaccattcaaaacagcatagcaagttaaaataaggctagtccgttatcaacttgaaaaagtggcaccgagtcggtgcttttttt

SEQ ID NO: 48 - RNA, 96 nt, synthetic construct
  misc_feature 1..96: note = gRNA from S. pyogenes
  misc_difference 1..20: note = n is a, c, g, or u
  misc_feature 1..20: note = Targeting domain
  source 1..96: mol_type = other RNA
nnnnnnnnnnnnnnnnnnnngttttagagctagaaatagcaagttaaaataaggctagtccgttatcaacttgaaaaagtggcaccgagtcggtgc

SEQ ID NO: 49 - RNA, 96 nt, synthetic construct
  misc_feature 1..96: note = gRNA
  misc_difference 1..20: note = n is a, c, g, or u
  misc_feature 1..20: note = Targeting domain
  misc_feature 21..32: note = First complementarity domain
  misc_feature 33..36: note = Linking domain
  misc_feature 37..50: note = Second complementarity domain
  misc_feature 51..62: note = Proximal domain
  source 1..96: mol_type = other RNA
nnnnnnnnnnnnnnnnnnnngtattagagctagaaatagcaagttaatataaggctagtccgttatcaacttgaaaaagtggcaccgagtcggtgc

SEQ ID NO: 50 - RNA, 104 nt, synthetic construct
  misc_feature 1..104: note = gRNA
  misc_difference 1..20: note = n is a, c, g, or u
  misc_feature 1..20: note = Targeting domain
  misc_feature 21..36: note = First complementarity domain
  misc_feature 37..40: note = Linking domain
  misc_feature 41..58: note = Second complementarity domain
  source 1..104: mol_type = other RNA
nnnnnnnnnnnnnnnnnnnngttttagagctatgctgaaaagcatagcaagttaaaataaggctagtccgttatcaacttgaaaaagtggcaccgagtcggtgc

SEQ ID NO: 51 - RNA, 106 nt, synthetic construct
  misc_feature 1..106: note = gRNA
  misc_difference 1..20: note = n is a, c, g, or u
  misc_feature 1..20: note = Targeting domain
  misc_feature 21..37: note = First complementarity domain
  misc_feature 38..41: note = Linking domain
  misc_feature 42..60: note = Second complementarity domain
  source 1..106: mol_type = other RNA
nnnnnnnnnnnnnnnnnnnngttttagagctatgctggaaacagcatagcaagttaaaataaggctagtccgttatcaacttgaaaaagtggcaccgagtcggtgc

SEQ ID NO: 52 - protein, 12 aa, Peptoniphilus duerdenii
DIGTASVGWAVT

SEQ ID NO: 53 - protein, 12 aa, Treponema denticola
DVGTGSVGWAVT

SEQ ID NO: 54 - protein, 12 aa, Streptococcus mutans
DIGTNSVGWAVV

SEQ ID NO: 55 - protein, 12 aa, Streptococcus mutans
DIGTNSVGWAVI

SEQ ID NO: 56 - protein, 12 aa, Streptococcus mutans
DIGTNSVGWAVL

SEQ ID NO: 57 - protein, 12 aa, Streptococcus mutans
DLGTNSIGWAVV

SEQ ID NO: 58 - protein, 11 aa, Pedobacter glucosidilyticus
DLGTNSIGWAI

SEQ ID NO: 59 - protein, 12 aa, Streptococcus mutans
DLGTNSIGWALV

SEQ ID NO: 60 - protein, 12 aa, Fusobacterium nucleatum
DIGTNSVGWCVT

SEQ ID NO: 61 - protein, 12 aa, Streptococcus mutans
DIGTNSVGYAVT

SEQ ID NO: 62 - protein, 12 aa, Streptococcus mutans
DMGTGSLGWAVT

SEQ ID NO: 63 - protein, 12 aa, Streptococcus mutans
DIGTSSVGWAAI

SEQ ID NO: 64 - protein, 12 aa, Streptococcus mutans
DLGTGSVGWAVV

SEQ ID NO: 65 - protein, 12 aa, Streptococcus mutans
DLGVGSVGWAIV

SEQ ID NO: 66 - protein, 12 aa, Streptococcus mutans
DLGIASIGWAII

SEQ ID NO: 67 - protein, 12 aa, Streptococcus mutans
DLGIASVGWAIV

SEQ ID NO: 68 - protein, 12 aa, Streptococcus mutans
DLGVASVGWSIV

SEQ ID NO: 69 - protein, 12 aa, Eubacterium rectale
DIGIASVGWAIL

SEQ ID NO: 70 - protein, 12 aa, Streptococcus mutans
DLGISSVGWSVI

SEQ ID NO: 71 - protein, 12 aa, Streptococcus mutans
DIGIASVGWSVI

SEQ ID NO: 72 - protein, 12 aa, Streptococcus mutans
DVGIGSIGWAVI

SEQ ID NO: 73 - protein, 12 aa, Streptococcus mutans
DLGVGSIGFAIV

SEQ ID NO: 74 - protein, 12 aa, Akkermansia muciniphila
DIGYASIGWAVI

SEQ ID NO: 75 - protein, 12 aa, Prevotella ruminicola
DTGTNSLGWAIV

SEQ ID NO: 76 - protein, 12 aa, Candidatus Puniceispirillum marinum
DLGTNSIGWCLL

SEQ ID NO: 77 - protein, 12 aa, Rhodospirillum rubrum
DIGTDSLGWAVF

SEQ ID NO: 78 - protein, 12 aa, Streptococcus mutans
DIGSNSIGFAVV

SEQ ID NO: 79 - protein, 12 aa, Streptococcus mutans
DLGVGSIGVAVA

SEQ ID NO: 80 - protein, 12 aa, Rhodopseudomonas palustris
DLGIASCGWGVV

SEQ ID NO: 81 - protein, 12 aa, Streptococcus mutans
DLGIASVGWCLT

SEQ ID NO: 82 - protein, 12 aa, Streptococcus mutans
DIGIGSVGVGIL

SEQ ID NO: 83 - protein, 12 aa, Streptococcus mutans
DIGITSVGYGLI

SEQ ID NO: 84 - protein, 12 aa, Streptococcus mutans
DIGITSVGFGII

SEQ ID NO: 85 - protein, 12 aa, Streptococcus mutans
DVGITSTGYAVL

SEQ ID NO: 86 - protein, 12 aa, Streptococcus mutans
DLGITSFGYAIL

SEQ ID NO: 87 - protein, 12 aa, Streptococcus mutans
DIGNASVGWSAF

SEQ ID NO: 88 - protein, 12 aa, Lactobacillus gasseri
DVGTNSCGWVAM

SEQ ID NO: 89 - protein, 12 aa, Streptococcus mutans
DVGERSIGLAAV

SEQ ID NO: 90 - protein, 12 aa, Streptococcus mutans
DVGLNSVGLAAV

SEQ ID NO: 91 - protein, 12 aa, Bifidobacterium dentium
DVGLMSVGLAAI

SEQ ID NO: 92 - protein, 12 aa, Corynebacterium diphtheriae
DVGTFSVGLAAI

SEQ ID NO: 93 - protein, 12 aa, Streptococcus mutans
DIGTGSVGYACM

SEQ ID NO: 94 - protein, 12 aa, Capnocytophaga ochracea
DLGTTSIGFAHI

SEQ ID NO: 95 - protein, 12 aa, Prevotella denticola
DLGTNSIGSSVR

SEQ ID NO: 96 - protein, 12 aa, Ralstonia solanacearum
DIGTNSIGWAVI

SEQ ID NO: 97 - protein, 12 aa, Streptococcus mutans
DLGIASVGWAVV

SEQ ID NO: 98 - protein, 12 aa, Comamonas granuli
DIGIASVGWAVL

SEQ ID NO: 99 - protein, 12 aa, Streptococcus mutans
DIGIASIGWAVI

SEQ ID NO: 100 - protein, 12 aa, Agathobacter rectalis
DIGIASVGWAII

SEQ ID NO: 101 - protein, 12 aa, Streptococcus mutans
DVGIASVGWAVI

SEQ ID NO: 102 - protein, 11 aa, Streptococcus mutans
DIGIASVGWAL

SEQ ID NO: 103 - protein, 12 aa, Neisseria meningitidis
DIGIASVGWAMV

SEQ ID NO: 104 - protein, 12 aa, Clostridium perfringens
DIGITSVGWAVI

SEQ ID NO: 105 - protein, 12 aa, Streptococcus mutans
DLGISSLGWAIV

SEQ ID NO: 106 - protein, 12 aa, Streptococcus mutans
DLGTNSIGWGLL

SEQ ID NO: 107 - protein, 12 aa, Verminephrobacter eiseniae
DLGSTSLGWAIF

SEQ ID NO: 108 - protein, 12 aa, Streptococcus mutans
DIGISSIGWAFS

SEQ ID NO: 109 - protein, 12 aa, Streptococcus mutans
DIGTTSIGFSVI

SEQ ID NO: 110 - protein, 12 aa, Streptococcus mutans
DIGTSSIGWWLY

SEQ ID NO: 111 - protein, 12 aa, Streptococcus mutans
DLGSNSLGWFVT

SEQ ID NO: 112 - protein, 12 aa, Streptococcus mutans
DLGANSLGWFVV

SEQ ID NO: 113 - protein, 15 aa, Bacillus cereus
DIGLRIGITSCGWSI

SEQ ID NO: 114 - protein, 12 aa, Sutterella wadsworthensis
DMGAKYTGVFYA

SEQ ID NO: 115 - protein, 12 aa, Streptococcus mutans
DLGGKNTGFFSF

SEQ ID NO: 116 - protein, 12 aa, Francisella tularensis
DLGVKNTGVFSA

SEQ ID NO: 117 - protein, 12 aa, Streptococcus mutans
DLGAKFTGVALY

SEQ ID NO: 118 - protein, 12 aa, Streptococcus mutans
DLGGKFTGVCLS

SEQ ID NO: 119 - protein, 12 aa, Parasutterella excrementihominis
DLGGTYTGTFIT

SEQ ID NO: 120 - protein, 12 aa, Streptococcus mutans
DIGTNSVGWAVT

SEQ ID NO: 121 - protein, 12 aa, Eubacterium yurii
DVGTNSVGWAVT

SEQ ID NO: 122 - protein, 12 aa, Butyrivibrio hungatei
DMGTNSVGWAVT

SEQ ID NO: 123 - protein, 12 aa, Streptococcus mutans
DVGTSSVGWAVT

SEQ ID NO: 124 - protein, 27 aa, Treponema denticola
DIDHIYPQSKIKDDSISNRVLVCSSCN

SEQ ID NO: 125 - protein, 27 aa, Streptococcus mutans
DIDHIYPQSKTMDDSLNNRVLVKKNYN

SEQ ID NO: 126 - protein, 27 aa, Peptoniphilus duerdenii
DQDHIYPKSKIYDDSLENRVLVKKNLN

SEQ ID NO: 127 - protein, 27 aa, Streptococcus mutans
QIDHIVPQSLVKDDSFDNRVLVVPSEN

SEQ ID NO: 128 - protein, 27 aa, Streptococcus mutans
DIDHIIPQAFIKDNSIDNRVLTSSKEN

SEQ ID NO: 129 - protein, 27 aa, Streptococcus mutans
DIDHIIPQAFLKDNSIDNKVLVSSASN

SEQ ID NO: 130 - protein, 27 aa, Streptococcus mutans
DIDHIIPQAYTKDNSLDNRVLVSNITN

SEQ ID NO: 131 - protein, 27 aa, Streptococcus mutans
DIDHIVPQSFITDNSIDNLVLTSSAGN

SEQ ID NO: 132 - protein, 27 aa, Streptococcus mutans
DVDHIVPQSFLKDDSIDNKVLTRSDKN

SEQ ID NO: 133 - protein, 27 aa, Streptococcus mutans
NIDHIYPQSMVKDDSLDNKVLVQSEIN

SEQ ID NO: 134 - protein, 27 aa, Streptococcus mutans
DIDHILPQSLIKDDSLDNRVLVNATIN

SEQ ID NO: 135 - protein, 27 aa, Lactobacillus gasseri
DIDHILPQSFIKDDSLENRVLVKKAVN

SEQ ID NO: 136 - protein, 27 aa, Streptococcus mutans
EVDHIFPRSFIKDDSIDNKVLVIKKMN

SEQ ID NO: 137 - protein, 27 aa, Olsenella uli
EVDHIIPRSYIKDDSFENKVLVYREEN

SEQ ID NO: 138 - protein, 27 aa, Streptococcus mutans
DIDHIIPQAVTQNDSIDNRVLVARAEN

SEQ ID NO: 139 - protein, 27 aa, Streptococcus mutans
EIDHIIPYSISFDDSSSNKLLVLAESN

SEQ ID NO: 140 - protein, 27 aa, Streptococcus mutans
EIDHIIPYSLCFDDSSANKVLVHKQSN

SEQ ID NO: 141 - protein, 27 aa, Streptococcus mutans
DIDHIIPYSRSMDDSYSNKVLVLSGEN

SEQ ID NO: 142 - protein, 27 aa, Streptococcus mutans
DIDHIIPYSKSMDDSFNNKVLCLAEEN

SEQ ID NO: 143 - protein, 27 aa, Campylobacter jejuni
EIDHIYPYSRSFDDSYMNKVLVFTKQN

SEQ ID NO: 144 - protein, 27 aa, Streptococcus mutans
QIDHIYPYSRSMDDSYMNKVLVLTDEN

SEQ ID NO: 145 - protein, 27 aa, Clostridium perfringens
EIDHIIPFSRSFDDSLSNKILVLGSEN

SEQ ID NO: 146 - protein, 27 aa, Streptococcus mutans
EIDHALPFSRTWDDSFNNKVLVLGSEN

SEQ ID NO: 147 - protein, 27 aa, Streptococcus mutans
EIDHALPFSRTWDDSFNNKVLVLASEN

SEQ ID NO: 148 - protein, 27 aa, Streptococcus mutans
EIDHIIPISISLDDSINNKVLVLSKAN

SEQ ID NO: 149 - protein, 27 aa, Streptococcus mutans
EVDHIIPISISLDDSITNKVLVTHREN

SEQ ID NO: 150 - protein, 27 aa, Acidovorax ebreus
QVDHALPYSRSYDDSKNNKVLVLTHEN

SEQ ID NO: 151 - protein, 27 aa, Streptococcus mutans
EVDHILPLSITFDDSLANKVLVYATAN

SEQ ID NO: 152 - protein, 27 aa, Eubacterium rectale
EIDHIIPRSISFDDARSNKVLVYRSEN

SEQ ID NO: 153 - protein, 27 aa, Streptococcus mutans
EVDHIIPRSVSFDNSYHNKVLVKQSEN

SEQ ID NO: 154 - protein, 27 aa, Roseburia intestinalis
DIDHILPYSITFDDSFRNKVLVTSQEN

SEQ ID NO: 155 - protein, 27 aa, Streptococcus mutans
EIDHILPRSRSADDSFANKVLCLARAN

SEQ ID NO: 156 - protein, 27 aa, Candidatus Puniceispirillum marinum
EIEHLLPFSLTLDDSMANKTVCFRQAN

SEQ ID NO: 157 - protein, 27 aa, Streptococcus mutans
DIDHILPFSVSLDDSAANKVVCLREAN

SEQ ID NO: 158 - protein, 27 aa, Streptococcus mutans
DIDHLIPFSISWDDSAANKVVCMRYAN

SEQ ID NO: 159 - protein, 27 aa, Streptococcus mutans
DIDHILPVAMTLDDSPANKIICMRYAN

SEQ ID NO: 160 - protein, 27 aa, Dinoroseobacter shibae
DVDHILPYSRTLDDSFPNRTLCLREAN

SEQ ID NO: 161 - protein, 27 aa, Verminephrobacter eiseniae
EIEHILPFSRTLDDSLNNRTVAMRRAN

SEQ ID NO: 162 - protein, 27 aa, Streptococcus mutans
EVDHIIPYSISWDDSYTNKVLTSAKCN

SEQ ID NO: 163 - protein, 27 aa, Rhodopseudomonas palustris
QVDHILPWSRFGDDSYLNKTLCTARSN

SEQ ID NO: 164 - protein, 27 aa, Streptococcus mutans
QVDHILPFSKTLDDSFANKVLAQHDAN

SEQ ID NO: 165 - protein, 27 aa, Streptococcus mutans
QIDHAFPLSRSLDDSQSNKVLCLTSSN

SEQ ID NO: 166 - protein, 27 aa, Streptococcus mutans
DIDHIVPRSISFDDSFSNLVIVNKLDN

SEQ ID NO: 167 - protein, 27 aa, Streptococcus mutans
EIEHIIPYSMSYDNSQANKILTEKAEN

SEQ ID NO: 168 - protein, 27 aa, Streptococcus mutans
EIDHVIPYSKSADDSWFNKLLVKKSTN

SEQ ID NO: 169 - protein, 27 aa, Streptococcus mutans
EMDHILPYSRSLDNGWHNRVLVHGKDN

SEQ ID NO: 170 - protein, 27 aa, Streptococcus mutans
EVDHIVPYSLILDNTINNKALVYAEEN

SEQ ID NO: 171 - protein, 27 aa, Fibrobacter succinogenes
EIEHVIPQSLYFDDSFSNKVICEAEVN

SEQ ID NO: 172 - protein, 27 aa, Streptococcus mutans
DIEHIIPQARLFDDSFSNKTLEARSVN

SEQ ID NO: 173 - protein, 27 aa, Capnocytophaga sputigena
EIEHIVPKARVFDDSFSNKTLTFHRIN

SEQ ID NO: 174 - protein, 28 aa, Finegoldia magna
DKDHIIPQSMKKDDSIINNLVLVNKNAN

SEQ ID NO: 175 - protein, 27 aa, Streptococcus mutans
EVEHIWPRSRSFDNSPRNKTLCRKDVN

SEQ ID NO: 176 - protein, 27 aa, Bacillus cereus
IVNHIIPYNRSFDDTYHNRVLTLTETK

SEQ ID NO: 177 - protein, 27 aa, Prevotella micans
DMEHTIPKSISFDNSDQNLTLCESYYN

SEQ ID NO: 178 - protein, 27 aa, Prevotella ruminicola
DIEHTIPRSAGGDSTKMNLTLCSSRFN

SEQ ID NO: 179 - protein, 27 aa, Flavobacterium columnare
DIEHTIPRSISQDNSQMNKTLCSLKFN

SEQ ID NO: 180 - protein, 27 aa, Rhodospirillum rubrum
DIDHVIPLARGGRDSLDNMVLCQSDAN

SEQ ID NO: 181 - protein, 27 aa, Streptococcus mutans
DIEHLFPIAESEDNGRNNLVISHSACN

SEQ ID NO: 182 - protein, 27 aa, Streptococcus mutans
DVDHIFPRDDTADNSYGNKVVAHRQCN

SEQ ID NO: 183 - protein, 27 aa, Streptococcus mutans
DIEHIVPQSLGGLSTDYNTIVTLKSVN

SEQ ID NO: 184 - protein, 27 aa, Streptococcus mutans
ELDHIVPRTDGGSNRHENLAITCGACN

SEQ ID NO: 185 - protein, 28 aa, Streptococcus mutans
EMDHIVPRKGVGSTNTRTNFAAVCAECN

SEQ ID NO: 186 - protein, 28 aa, Bifidobacterium dentium
EMDHIVPRKGVGSTNTRVNLAAACAACN

SEQ ID NO: 187 - protein, 28 aa, Corynebacterium diphtheriae
EMDHIVPRAGQGSTNTRENLVAVCHRCN

SEQ ID NO: 188 - protein, 33 aa, Sutterella wadsworthensis
EIDHILPRSLIKDARGIVFNAEPNLIYASSRGN

SEQ ID NO: 189 - protein, 33 aa, Streptococcus mutans
EIDHIIPRSLTGRTKKTVFNSEANLIYCSSKGN

SEQ ID NO: 190 - protein, 33 aa, Parasutterella excrementihominis
EIDHIIPRSLTLKKSESIYNSEVNLIFVSAQGN

SEQ ID NO: 191 - protein, 33 aa, Streptococcus mutans
EIDHIYPRSLSKKHFGVIFNSEVNLIYCSSQGN

SEQ ID NO: 192 - protein, 33 aa, Streptococcus mutans
EIDHILPRSHTLKIYGTVFNPEGNLIYVHQKCN

SEQ ID NO: 193 - protein, 30 aa, Francisella tularensis
ELDHIIPRSHKKYGTLNDEANLICVTRGDN

SEQ ID NO: 194 - protein, 27 aa, Akkermansia muciniphila
ELEHIVPHSFRQSNALSSLVLTWPGVN

SEQ ID NO: 195 - protein, 27 aa, Streptococcus mutans
DIDHIYPRSKIKDDSITNRVLVEKDIN

SEQ ID NO: 196 - protein, 28 aa, Streptococcus mutans
YDIDHIYPRSLTKDDSFDNLVLCERTAN

SEQ ID NO: 197 - protein, 28 aa, Fusobacterium nucleatum
DIDHIYPRSKVIKDDSFDNLVLVLKNEN

SEQ ID NO: 198 - protein, 27 aa, Filifactor alocis
DRDHIYPQSKIKDDSIDNLVLVNKTYN

SEQ ID NO: 199-250 - skipped (52 entries)

SEQ ID NO: 251 - RNA, 17 nt, synthetic construct
  misc_feature 1..17: note = Targeting domain
  source 1..17: mol_type = other RNA
gaaggaaactagctaaa

SEQ ID NO: 252 - RNA, 20 nt, synthetic construct
  misc_feature 1..20: note = Targeting domain
  source 1..20: mol_type = other RNA
ggagaaggaaactagctaaa

SEQ ID NO: 253 - RNA, 20 nt, synthetic construct
  misc_feature 1..20: note = Targeting domain
  source 1..20: mol_type = other RNA
gggagaaggaaactagctaa

SEQ ID NO: 254 - RNA, 20 nt, synthetic construct
  misc_feature 1..20: note = Targeting domain
  source 1..20: mol_type = other RNA
gtatcctctatgatgggaga

SEQ ID NO: 255 - RNA, 20 nt, synthetic construct
  misc_feature 1..20: note = Targeting domain
  source 1..20: mol_type = other RNA
gtttccttctcccatcatag

SEQ ID NO: 256 - RNA, 20 nt, synthetic construct
  misc_feature 1..20: note = Targeting domain
  source 1..20: mol_type = other RNA
gtcctggtatcctctatgat

SEQ ID NO: 257 - RNA, 17 nt, synthetic construct
  misc_feature 1..17: note = Targeting domain
  source 1..17: mol_type = other RNA
agaaggaaactagctaa

SEQ ID NO: 258 - RNA, 17 nt, synthetic construct
  misc_feature 1..17: note = Targeting domain
  source 1..17: mol_type = other RNA
tcctctatgatgggaga

SEQ ID NO: 259 - RNA, 17 nt, synthetic construct
  misc_feature 1..17: note = Targeting domain
  source 1..17: mol_type = other RNA
cctggtatcctctatga

SEQ ID NO: 260 - RNA, 17 nt, synthetic construct
  misc_feature 1..17: note = Targeting domain
  source 1..17: mol_type = other RNA
ccatcatagaggatacc

SEQ ID NO: 261 - RNA, 17 nt, synthetic construct
  misc_feature 1..17: note = Targeting domain
  source 1..17: mol_type = other RNA
tccttctcccatcatag

SEQ ID NO: 262 - RNA, 17 nt, synthetic construct
  misc_feature 1..17: note = Targeting domain
  source 1..17: mol_type = other RNA
tagcagtatcctcttgg

SEQ ID NO: 263 - RNA, 17 nt, synthetic construct
  misc_feature 1..17: note = Targeting domain
  source 1..17: mol_type = other RNA
ttagcagtatcctcttg

SEQ ID NO: 264 - RNA, 17 nt, synthetic construct
  misc_feature 1..17: note = Targeting domain
  source 1..17: mol_type = other RNA
aactggaatgactgaat

SEQ ID NO: 265 - RNA, 17 nt, synthetic construct
  misc_feature 1..17: note = Targeting domain
  source 1..17: mol_type = other RNA
ctggtatcctctatgat

SEQ ID NO: 266 - RNA, 17 nt, synthetic construct
  misc_feature 1..17: note = Targeting domain
  source 1..17: mol_type = other RNA
aattagcagtatcctct

SEQ ID NO: 267 - RNA, 17 nt, synthetic construct
  misc_feature 1..17: note = Targeting domain
  source 1..17: mol_type = other RNA
attagcagtatcctctt

SEQ ID NO: 268 - RNA, 20 nt, synthetic construct
  misc_feature 1..20: note = Targeting domain
  source 1..20: mol_type = other RNA
agtcctggtatcctctatga

SEQ ID NO: 269 - RNA, 20 nt, synthetic construct
  misc_feature 1..20: note = Targeting domain
  source 1..20: mol_type = other RNA
ctcccatcatagaggatacc

SEQ ID NO: 270 - RNA, 20 nt, synthetic construct
  misc_feature 1..20: note = Targeting domain
  source 1..20: mol_type = other RNA
aattagcagtatcctcttgg

SEQ ID NO: 271 - RNA, 20 nt, synthetic construct
  misc_feature 1..20: note = Targeting domain
  source 1..20: mol_type = other RNA
aaattagcagtatcctcttg

SEQ ID NO: 272 - RNA, 20 nt, synthetic construct
  misc_feature 1..20: note = Targeting domain
  source 1..20: mol_type = other RNA
aaaaactggaatgactgaat

SEQ ID NO: 273 - RNA, 20 nt, synthetic construct
  misc_feature 1..20: note = Targeting domain
  source 1..20: mol_type = other RNA
aaaaattagcagtatcctct

SEQ ID NO: 274 - RNA, 20 nt, synthetic construct
  misc_feature 1..20: note = Targeting domain
  source 1..20: mol_type = other RNA
aaaattagcagtatcctctt

SEQ ID NO: 275 - RNA, 17 nt, synthetic construct
  misc_feature 1..17: note = Targeting domain
  source 1..17: mol_type = other RNA
gaatcggaacaaggcaa

SEQ ID NO: 276 - RNA, 17 nt, synthetic construct
  misc_feature 1..17: note = Sp38 targeting domain
  source 1..17: mol_type = other RNA
gaccaatagccttgaca

SEQ ID NO: 277 - RNA, 17 nt, synthetic construct
  misc_feature 1..17: note = Sp9 targeting domain
  source 1..17: mol_type = other RNA
ggctattggtcaaggca

SEQ ID NO: 278 - RNA, 17 nt, synthetic construct
  misc_feature 1..17: note = Sp43 targeting domain
  source 1..17: mol_type = other RNA
gtcaaggctattggtca

SEQ ID NO: 279 - RNA, 17 nt, synthetic construct
  misc_feature 1..17: note = Targeting domain
  source 1..17: mol_type = other RNA
gtgtgtggaactgctga

SEQ ID NO: 280 - RNA, 17 nt, synthetic construct
  misc_feature 1..17: note = Targeting domain
  source 1..17: mol_type = other RNA
gggccggcggctggcta

SEQ ID NO: 281 - RNA, 17 nt, synthetic construct
  misc_feature 1..17: note = Targeting domain
  source 1..17: mol_type = other RNA
gagtatccagtgaggcc

SEQ ID NO: 282 - RNA, 17 nt, synthetic construct
  misc_feature 1..17: note = Targeting domain
  source 1..17: mol_type = other RNA
gctgacaaaagaagtcc

SEQ ID NO: 283 - RNA, 17 nt, synthetic construct
  misc_feature 1..17: note = Targeting domain
  source 1..17: mol_type = other RNA
ggccaggggccggcggc

SEQ ID NO: 284 - RNA, 17 nt, synthetic construct
  misc_feature 1..17: note = Targeting domain
  source 1..17: mol_type = other RNA
gggaaggggcccccaag

SEQ ID NO: 285 - RNA, 17 nt, synthetic construct
  misc_feature 1..17: note = Targeting domain
  source 1..17: mol_type = other RNA
gagatagtgtggggaag

SEQ ID NO: 286 - RNA, 17 nt, synthetic construct
  misc_feature 1..17: note = Targeting domain
  source 1..17: mol_type = other RNA
gtatccagtgaggccag

SEQ ID NO: 287 - RNA, 17 nt, synthetic construct
  misc_feature 1..17: note = Targeting domain
  source 1..17: mol_type = other RNA
gtgaggccaggggccgg

SEQ ID NO: 288 - RNA, 17 nt, synthetic construct
  misc_feature 1..17: note = Targeting domain
  source 1..17: mol_type = other RNA
gctggccaacccatggg

SEQ ID NO: 289 - RNA, 17 nt, synthetic construct
  misc_feature 1..17: note = Targeting domain
  source 1..17: mol_type = other RNA
ggctaaactccacccat

SEQ ID NO: 290 - RNA, 17 nt, synthetic construct
  misc_feature 1..17: note = Targeting domain
  source 1..17: mol_type = other RNA
ggatactctaagactat

SEQ ID NO: 291 - RNA, 17 nt, synthetic construct
  misc_feature 1..17: note = Targeting domain
  source 1..17: mol_type = other RNA
ggggccggcggctggct

SEQ ID NO: 292 - RNA, 20 nt, synthetic construct
  misc_feature 1..20: note = Targeting domain
  source 1..20: mol_type = other RNA
ggctagggatgaagaataaa

SEQ ID NO: 293 - RNA, 20 nt, synthetic construct
  misc_feature 1..20: note = Targeting domain
  source 1..20: mol_type = other RNA
gagtgtgtggaactgctgaa

SEQ ID NO: 294 - RNA, 20 nt, synthetic construct
  misc_feature 1..20: note = Targeting domain
  source 1..20: mol_type = other RNA
ggaatgactgaatcggaaca

SEQ ID NO: 295 - RNA, 20 nt, synthetic construct
  misc_feature 1..20: note = Targeting domain
  source 1..20: mol_type = other RNA
gcattgagatagtgtgggga

SEQ ID NO: 296 - RNA, 20 nt, synthetic construct
  misc_feature 1..20: note = Targeting domain
  source 1..20: mol_type = other RNA
gctattggtcaaggcaaggc

SEQ ID NO: 297 - RNA, 20 nt, synthetic construct
  misc_feature 1..20: note = Targeting domain
  source 1..20: mol_type = other RNA
gtggggaaggggcccccaag

SEQ ID NO: 298 - RNA, 20 nt, synthetic construct
  misc_feature 1..20: note = Targeting domain
  source 1..20: mol_type = other RNA
ggcaaggctggccaacccat

SEQ ID NO: 299 - RNA, 20 nt, synthetic construct
  misc_feature 1..20: note = Sp42 targeting domain
  source 1..20: mol_type = other RNA
gtttgccttgtcaaggctat

SEQ ID NO: 300 - RNA, 20 nt, synthetic construct
  misc_feature 1..20: note = Targeting domain
  source 1..20: mol_type = other RNA
gctaaactccacccatgggt

SEQ ID NO: 301 - RNA, 17 nt, synthetic construct
  misc_feature 1..17: note = Targeting domain
  source 1..17: mol_type = other RNA
caaatatctgtctgaaa

SEQ ID NO: 302 - RNA, 17 nt, synthetic construct
  misc_feature 1..17: note = Targeting domain
  source 1..17: mol_type = other RNA
tagggatgaagaataaa

SEQ ID NO: 303 - RNA, 17 nt, synthetic construct
  misc_feature 1..17: note = Targeting domain
  source 1..17: mol_type = other RNA
tgagatagtgtggggaa

SEQ ID NO: 304 - RNA, 17 nt, synthetic construct
  misc_feature 1..17: note = Targeting domain
  source 1..17: mol_type = other RNA
tgtgtggaactgctgaa

SEQ ID NO: 305 - RNA, 17 nt, synthetic construct
  misc_feature 1..17: note = Targeting domain
  source 1..17: mol_type = other RNA
atgactgaatcggaaca

SEQ ID NO: 306 - RNA, 17 nt, synthetic construct
  misc_feature 1..17: note = Targeting domain
  source 1..17: mol_type = other RNA
caaggctggccaaccca

SEQ ID NO: 307 - RNA, 17 nt, synthetic construct
  misc_feature 1..17: note = Targeting domain
  source 1..17: mol_type = other RNA
tggctaaactccaccca

SEQ ID NO: 308 - RNA, 17 nt, synthetic construct
  misc_feature 1..17: note = Targeting domain
  source 1..17: mol_type = other RNA
tgggtggagtttagcca

SEQ ID NO: 309 - RNA, 17 nt, synthetic construct
  misc_feature 1..17: note = Targeting domain
  source 1..17: mol_type = other RNA
agtatccagtgaggcca

SEQ ID NO: 310 - RNA, 17 nt, synthetic construct
  misc_feature 1..17: note = Sp41 targeting domain
  source 1..17: mol_type = other RNA
tcaagtttgccttgtca

SEQ ID NO: 311 - RNA, 17 nt, synthetic construct
  misc_feature 1..17: note = Targeting domain
  source 1..17: mol_type = other RNA
ttgagatagtgtgggga

SEQ ID NO: 312 - RNA, 17 nt, synthetic construct
  misc_feature 1..17: note = Targeting domain
  source 1..17: mol_type = other RNA
ataaattagagaaaaac

SEQ ID NO: 313 - RNA, 17 nt, synthetic construct
  misc_feature 1..17: note = Targeting domain
  source 1..17: mol_type = other RNA
ccggcccctggcctcac

SEQ ID NO: 314 - RNA, 17 nt, synthetic construct
  misc_feature 1..17: note = Targeting domain
  source 1..17: mol_type = other RNA
agccagccgccggcccc

SEQ ID NO: 315 - RNA, 17 nt, synthetic construct
  misc_feature 1..17: note = Targeting domain
  source 1..17: mol_type = other RNA
ctgtctgaaacggtccc

SEQ ID NO: 316 - RNA, 17 nt, synthetic construct
  misc_feature 1..17: note = Targeting domain
  source 1..17: mol_type = other RNA
atgggtggagtttagcc

SEQ ID NO: 317 - RNA, 17 nt, synthetic construct
  misc_feature 1..17: note = Targeting domain
  source 1..17: mol_type = other RNA
catccctagccagccgc

SEQ ID NO: 318 - RNA, 17 nt, synthetic construct
  misc_feature 1..17: note = Targeting domain
  source 1..17: mol_type = other RNA
attggtcaaggcaaggc

SEQ ID NO: 319 - RNA, 17 nt, synthetic construct
  misc_feature 1..17: note = Targeting domain
  source 1..17: mol_type = other RNA
ccagtgaggccaggggc

SEQ ID NO: 320 - RNA, 17 nt, synthetic construct
  misc_feature 1..17: note = Targeting domain
  source 1..17: mol_type = other RNA
ttccacacactcgcttc

SEQ ID NO: 321 - RNA, 17 nt, synthetic construct
  misc_feature 1..17: note = Targeting domain
  source 1..17: mol_type = other RNA
cgcttctggaacgtctg

SEQ ID NO: 322 - RNA, 17 nt, synthetic construct
  misc_feature 1..17: note = Targeting domain
  source 1..17: mol_type = other RNA
tcttagagtatccagtg

SEQ ID NO: 323 - RNA, 17 nt, synthetic construct
  misc_feature 1..17: note = Targeting domain
  source 1..17: mol_type = other RNA
tttgcattgagatagtg

SEQ ID NO: 324 - RNA, 17 nt, synthetic construct
  misc_feature 1..17: note = Targeting domain
  source 1..17: mol_type = other RNA
ttccagaagcgagtgtg

SEQ ID NO: 325 - RNA, 17 nt, synthetic construct
  misc_feature 1..17: note = Targeting domain
  source 1..17: mol_type = other RNA
tgcattgagatagtgtg

SEQ ID NO: 326 - RNA, 17 nt, synthetic construct
  misc_feature 1..17: note = Targeting domain
  source 1..17: mol_type = other RNA
aaggctggccaacccat

SEQ ID NO: 327 - RNA, 17 nt, synthetic construct
  misc_feature 1..17: note = Sp40 targeting domain
  source 1..17: mol_type = other RNA
tgccttgtcaaggctat

SEQ ID NO: 328 - RNA, 17 nt, synthetic construct
  misc_feature 1..17: note = Targeting domain
  source 1..17: mol_type = other RNA
aaactccacccatgggt

SEQ ID NO: 329 - RNA, 17 nt, synthetic construct
  misc_feature 1..17: note = Targeting domain
  source 1..17: mol_type = other RNA
ttgcattgagatagtgt

SEQ ID NO: 330 - RNA, 20 nt, synthetic construct
  misc_feature 1..20: note = Targeting domain
  source 1..20: mol_type = other RNA
atgcaaatatctgtctgaaa

SEQ ID NO: 331 - RNA, 20 nt, synthetic construct
  misc_feature 1..20: note = Targeting domain
  source 1..20: mol_type = other RNA
actgaatcggaacaaggcaa

SEQ ID NO: 332 - RNA, 20 nt, synthetic construct
  misc_feature 1..20: note = Targeting domain
  source 1..20: mol_type = other RNA
cattgagatagtgtggggaa

SEQ ID NO: 333 - RNA, 20 nt, synthetic construct
  misc_feature 1..20: note = Sp37 targeting domain
  source 1..20: mol_type = other RNA
cttgaccaatagccttgaca

SEQ ID NO: 334 - RNA, 20 nt, synthetic construct
  misc_feature 1..20: note = Targeting domain
  source 1..20: mol_type = other RNA
aggcaaggctggccaaccca

SEQ ID NO: 335 - RNA, 20 nt, synthetic construct
  misc_feature 1..20: note = Targeting domain
  source 1..20: mol_type = other RNA
ccctggctaaactccaccca

SEQ ID NO: 336 - RNA, 20 nt, synthetic construct
  misc_feature 1..20: note = Targeting domain
  source 1..20: mol_type = other RNA
ccatgggtggagtttagcca

SEQ ID NO: 337 - RNA, 20 nt, synthetic construct
  misc_feature 1..20: note = Targeting domain
  source 1..20: mol_type = other RNA
tagagtatccagtgaggcca

SEQ ID NO: 338 - RNA, 20 nt, synthetic construct
  misc_feature 1..20: note = Sp36 targeting domain
  source 1..20: mol_type = other RNA
caaggctattggtcaaggca

SEQ ID NO: 339 - RNA, 20 nt, synthetic construct
  misc_feature 1..20: note = Sp35 targeting domain
  source 1..20: mol_type = other RNA
cttgtcaaggctattggtca

SEQ ID NO: 340 - RNA, 20 nt, synthetic construct
  misc_feature 1..20: note = Sp34 targeting domain
  source 1..20: mol_type = other RNA
tggtcaagtttgccttgtca

SEQ ID NO: 341 - RNA, 20 nt, synthetic construct
  misc_feature 1..20: note = Targeting domain
  source 1..20: mol_type = other RNA
cgagtgtgtggaactgctga

SEQ ID NO: 342 - RNA, 20 nt, synthetic construct
  misc_feature 1..20: note = Targeting domain
  source 1..20: mol_type = other RNA
caggggccggcggctggcta

SEQ ID NO: 343 - RNA, 20 nt, synthetic construct
  misc_feature 1..20: note = Targeting domain
  source 1..20: mol_type = other RNA
agaataaattagagaaaaac

SEQ ID NO: 344 - RNA, 20 nt, synthetic construct
  misc_feature 1..20: note = Targeting domain
  source 1..20: mol_type = other RNA
ccgccggcccctggcctcac

SEQ ID NO: 345 - RNA, 20 nt, synthetic construct
  misc_feature 1..20: note = Targeting domain
  source 1..20: mol_type = other RNA
cctagccagccgccggcccc

SEQ ID NO: 346 - RNA, 20 nt, synthetic construct
  misc_feature 1..20: note = Targeting domain
  source 1..20: mol_type = other RNA
tatctgtctgaaacggtccc

SEQ ID NO: 347 - RNA, 20 nt, synthetic construct
  misc_feature 1..20: note = Targeting domain
  source 1..20: mol_type = other RNA
cccatgggtggagtttagcc

SEQ ID NO: 348 - RNA, 20 nt, synthetic construct
  misc_feature 1..20: note = Targeting domain
  source 1..20: mol_type = other RNA
ttagagtatccagtgaggcc

SEQ ID NO: 349 - RNA, 20 nt, synthetic construct
  misc_feature 1..20: note = Targeting domain
  source 1..20: mol_type = other RNA
acggctgacaaaagaagtcc

SEQ ID NO: 350 - RNA, 20 nt, synthetic construct
  misc_feature 1..20: note = Targeting domain
  source 1..20: mol_type = other RNA
cttcatccctagccagccgc

SEQ ID NO: 351 - RNA, 20 nt, synthetic construct
  misc_feature 1..20: note = Targeting domain
  source 1..20: mol_type = other RNA
tgaggccaggggccggcggc

SEQ ID NO: 352 - RNA, 20 nt, synthetic construct
  misc_feature 1..20: note = Targeting domain
  source 1..20: mol_type = other RNA
tatccagtgaggccaggggc

SEQ ID NO: 353 - RNA, 20 nt, synthetic construct
  misc_feature 1..20: note = Targeting domain
  source 1..20: mol_type = other RNA
cagttccacacactcgcttc

SEQ ID NO: 354 - RNA, 20 nt, synthetic construct
  misc_feature 1..20: note = Targeting domain
  source 1..20: mol_type = other RNA
attgagatagtgtggggaag

SEQ ID NO: 355 - RNA, 20 nt, synthetic construct
  misc_feature 1..20: note = Targeting domain
  source 1..20: mol_type = other RNA
agagtatccagtgaggccag

SEQ ID NO: 356 - RNA, 20 nt, synthetic construct
  misc_feature 1..20: note = Targeting domain
  source 1..20: mol_type = other RNA
ccagtgaggccaggggccgg

SEQ ID NO: 357 - RNA, 20 nt, synthetic construct
  misc_feature 1..20: note = Targeting domain
  source 1..20: mol_type = other RNA
aaggctggccaacccatggg

SEQ ID NO: 358 - RNA, 20 nt, synthetic construct
  misc_feature 1..20: note = Targeting domain
  source 1..20: mol_type = other RNA
actcgcttctggaacgtctg

SEQ ID NO: 359 - RNA, 20 nt, synthetic construct
  misc_feature 1..20: note = Targeting domain
  source 1..20: mol_type = other RNA
tagtcttagagtatccagtg

SEQ ID NO: 360 - RNA, 20 nt, synthetic construct
  misc_feature 1..20: note = Targeting domain
  source 1..20: mol_type = other RNA
atatttgcattgagatagtg

SEQ ID NO: 361 - RNA, 20 nt, synthetic construct
  misc_feature 1..20: note = Targeting domain
  source 1..20: mol_type = other RNA
acgttccagaagcgagtgtg

SEQ ID NO: 362 - RNA, 20 nt, synthetic construct
  misc_feature 1..20: note = Targeting domain
  source 1..20: mol_type = other RNA
atttgcattgagatagtgtg

SEQ ID NO: 363 - RNA, 20 nt, synthetic construct
  misc_feature 1..20: note = Targeting domain
  source 1..20: mol_type = other RNA
cctggctaaactccacccat

SEQ ID NO: 364 - RNA, 20 nt, synthetic construct
  misc_feature 1..20: note = Targeting domain
  source 1..20: mol_type = other RNA
actggatactctaagactat

SEQ ID NO: 365 - RNA, 20 nt, synthetic construct
  misc_feature 1..20: note = Targeting domain
  source 1..20: mol_type = other RNA
ccaggggccggcggctggct

SEQ ID NO: 366 - RNA, 20 nt, synthetic construct
  misc_feature 1..20: note = Targeting domain
  source 1..20: mol_type = other RNA
tatttgcattgagatagtgt

SEQ ID NO: 367 - RNA, 19 nt, synthetic construct
  misc_feature 1..19: note = Targeting domain
  source 1..19: mol_type = other RNA
gtttccttctcccatcata

SEQ ID NO: 368 - RNA, 23 nt, synthetic construct
  misc_feature 1..23: note = Targeting domain
  source 1..23: mol_type = other RNA
gctagtttccttctcccatcata

SEQ ID NO: 369 - RNA, 19 nt, synthetic construct
  misc_feature 1..19: note = Targeting domain
  source 1..19: mol_type = other RNA
gaataaattagagaaaaac

SEQ ID NO: 370 - RNA, 22 nt, synthetic construct
  misc_feature 1..22: note = Targeting domain
  source 1..22: mol_type = other RNA
gaagaataaattagagaaaaac

SEQ ID NO: 371 - RNA, 23 nt, synthetic construct
  misc_feature 1..23: note = Targeting domain
  source 1..23: mol_type = other RNA
ggaagaataaattagagaaaaac

SEQ ID NO: 372 - RNA, 24 nt, synthetic construct
  misc_feature 1..24: note = Targeting domain
  source 1..24: mol_type = other RNA
gggaagaataaattagagaaaaac

SEQ ID NO: 373 - RNA, 20 nt, synthetic construct
  misc_feature 1..20: note = Targeting domain
  source 1..20: mol_type = other RNA
gaaggaaactagctaaaggg

SEQ ID NO: 374 - RNA, 22 nt, synthetic construct
  misc_feature 1..22: note = Targeting domain
  source 1..22: mol_type = other RNA
gagaaggaaactagctaaaggg

SEQ ID NO: 375 - RNA, 23 nt, synthetic construct
  misc_feature 1..23: note = Targeting domain
  source 1..23: mol_type = other RNA
ggagaaggaaactagctaaaggg

SEQ ID NO: 376 - RNA, 24 nt, synthetic construct
  misc_feature 1..24: note = Targeting domain
  source 1..24: mol_type = other RNA
gggagaaggaaactagctaaaggg

SEQ ID NO: 377 - RNA, 18 nt, synthetic construct
  misc_feature 1..18: note = Targeting domain
  source 1..18: mol_type = other RNA
tttccttctcccatcata

SEQ ID NO: 378 - RNA, 20 nt, synthetic construct
  misc_feature 1..20: note = Targeting domain
  source 1..20: mol_type = other RNA
agtttccttctcccatcata

SEQ ID NO: 379 - RNA, 21 nt, synthetic construct
  misc_feature 1..21: note = Targeting domain
  source 1..21: mol_type = other RNA
tagtttccttctcccatcata

SEQ ID NO: 380 - RNA, 22 nt, synthetic construct
  misc_feature 1..22: note = Targeting domain
  source 1..22: mol_type = other RNA
ctagtttccttctcccatcata

SEQ ID NO: 381 - RNA, 24 nt, synthetic construct
  misc_feature 1..24: note = Targeting domain
  source 1..24: mol_type = other RNA
agctagtttccttctcccatcata

SEQ ID NO: 382 - RNA, 18 nt, synthetic construct
  misc_feature 1..18: note = Targeting domain
  source 1..18: mol_type = other RNA
agagaaaaactggaatga

SEQ ID NO: 383 - RNA, 19 nt, synthetic construct
  misc_feature 1..19: note = Targeting domain
  source 1..19: mol_type = other RNA
tagagaaaaactggaatga

SEQ ID NO: 384 - RNA, 20 nt, synthetic construct
  misc_feature 1..20: note = Targeting domain
  source 1..20: mol_type = other RNA
ttagagaaaaactggaatga

SEQ ID NO: 385 - RNA, 21 nt, synthetic construct
  misc_feature 1..21: note = Targeting domain
  source 1..21: mol_type = other RNA
attagagaaaaactggaatga

SEQ ID NO: 386 - RNA, 22 nt, synthetic construct
  misc_feature 1..22: note = Targeting domain
  source 1..22: mol_type = other RNA
aattagagaaaaactggaatga

SEQ ID NO: 387 - RNA, 23 nt, synthetic construct
  misc_feature 1..23: note = Targeting domain
  source 1..23: mol_type = other RNA
aaattagagaaaaactggaatga

SEQ ID NO: 388 - RNA, 24 nt, synthetic construct
  misc_feature 1..24: note = Targeting domain
  source 1..24: mol_type = other RNA
taaattagagaaaaactggaatga

SEQ ID NO: 389 - RNA, 18 nt, synthetic construct
  misc_feature 1..18: note = Targeting domain
  source 1..18: mol_type = other RNA
aataaattagagaaaaac

SEQ ID NO: 390 - RNA, 21 nt, synthetic construct
  misc_feature 1..21: note = Targeting domain
  source 1..21: mol_type = other RNA
aagaataaattagagaaaaac

SEQ ID NO: 391 - RNA, 18 nt, synthetic construct
  misc_feature 1..18: note = Targeting domain
  source 1..18: mol_type = other RNA
aggaaactagctaaaggg

SEQ ID NO: 392 - RNA, 19 nt, synthetic construct
  misc_feature 1..19: note = Targeting domain
  source 1..19: mol_type = other RNA
aaggaaactagctaaaggg

SEQ ID NO: 393 - RNA, 21 nt, synthetic construct
  misc_feature 1..21: note = Targeting domain
  source 1..21: mol_type = other RNA
agaaggaaactagctaaaggg

SEQ ID NO: 394 - RNA, 18 nt, synthetic construct
  misc_feature 1..18: note = Targeting domain
  source 1..18: mol_type = other RNA
tggggaaggggcccccaa

SEQ ID NO: 395 - RNA, 19 nt, synthetic construct
  misc_feature 1..19: note = Targeting domain
  source 1..19: mol_type = other RNA
gtggggaaggggcccccaa

SEQ ID NO: 396 - RNA, 20 nt, synthetic construct
  misc_feature 1..20: note = Targeting domain
  source 1..20: mol_type = other RNA
tgtggggaaggggcccccaa

SEQ ID NO: 397 - RNA, 21 nt, synthetic construct
  misc_feature 1..21: note = Targeting domain
  source 1..21: mol_type = other RNA
gtgtggggaaggggcccccaa

SEQ ID NO: 398 - RNA, 22 nt, synthetic construct
  misc_feature 1..22: note = Targeting domain
  source 1..22: mol_type = other RNA
agtgtggggaaggggcccccaa

SEQ ID NO: 399 - RNA, 23 nt, synthetic construct
  misc_feature 1..23: note = Targeting domain
  source 1..23: mol_type = other RNA
tagtgtggggaaggggcccccaa

SEQ ID NO: 400 - RNA, 24 nt, synthetic construct
  misc_feature 1..24: note = Targeting domain
  source 1..24: mol_type = other RNA
atagtgtggggaaggggcccccaa

SEQ ID NO: 401 - RNA, 18 nt, synthetic construct
  misc_feature 1..18: note = Targeting domain
  source 1..18: mol_type = other RNA
acctcagacgttccagaa

SEQ ID NO: 402 - RNA, 19 nt, synthetic construct
  misc_feature 1..19: note = Targeting domain
  source 1..19: mol_type = other RNA
aacctcagacgttccagaa

SEQ ID NO: 403 - RNA, 20 nt, synthetic construct
  misc_feature 1..20: note = Targeting domain
  source 1..20: mol_type = other RNA
taacctcagacgttccagaa

SEQ ID NO: 404 - RNA, 21 nt, synthetic construct
  misc_feature 1..21: note = Targeting domain
  source 1..21: mol_type = other RNA
ataacctcagacgttccagaa

SEQ ID NO: 405 - RNA, 22 nt, synthetic construct
  misc_feature 1..22: note = Targeting domain
  source 1..22: mol_type = other RNA
gataacctcagacgttccagaa

SEQ ID NO: 406 - RNA, 23 nt, synthetic construct
  misc_feature 1..23: note = Targeting domain
  source 1..23: mol_type = other RNA
tgataacctcagacgttccagaa

SEQ ID NO: 407 - RNA, 24 nt, synthetic construct
  misc_feature 1..24: note = Targeting domain
  source 1..24: mol_type = other RNA
ttgataacctcagacgttccagaa

SEQ ID NO: 408 - RNA, 18 nt, synthetic construct
  misc_feature 1..18: note = Targeting domain
  source 1..18: mol_type = other RNA
cgccggcccctggcctca

SEQ ID NO: 409 - RNA, 19 nt, synthetic construct
  misc_feature 1..19: note = Targeting domain
  source 1..19: mol_type = other RNA
ccgccggcccctggcctca

SEQ ID NO: 410 - RNA, 20 nt, synthetic construct
  misc_feature 1..20: note = Targeting domain
  source 1..20: mol_type = other RNA
gccgccggcccctggcctca

SEQ ID NO: 411 - RNA, 21 nt, synthetic construct
  misc_feature 1..21: note = Targeting domain
  source 1..21: mol_type = other RNA
agccgccggcccctggcctca

SEQ ID NO: 412 - RNA, 22 nt, synthetic construct
  misc_feature 1..22: note = Targeting domain
  source 1..22: mol_type = other RNA
cagccgccggcccctggcctca

SEQ ID NO: 413 - RNA, 23 nt, synthetic construct
  misc_feature 1..23: note = Targeting domain
  source 1..23: mol_type = other RNA
ccagccgccggcccctggcctca

SEQ ID NO: 414 - RNA, 24 nt, synthetic construct
  misc_feature 1..24: note = Targeting domain
  source 1..24: mol_type = other RNA
gccagccgccggcccctggcctca

SEQ ID NO: 415 - RNA, 18 nt, synthetic construct
  misc_feature 1..18: note = Targeting domain
  source 1..18: mol_type = other RNA
ggcaaggctggccaaccc

SEQ ID NO: 416 - RNA, 19 nt, synthetic construct
  misc_feature 1..19: note = Targeting domain
  source 1..19: mol_type = other RNA
aggcaaggctggccaaccc

SEQ ID NO: 417 - RNA, 20 nt, synthetic construct
  misc_feature 1..20: note = Targeting domain
  source 1..20: mol_type = other RNA
aaggcaaggctggccaaccc

SEQ ID NO: 418 - RNA, 21 nt, synthetic construct
  misc_feature 1..21: note = Targeting domain
  source 1..21: mol_type = other RNA
caaggcaaggctggccaaccc

SEQ ID NO: 419 - RNA, 22 nt, synthetic construct
  misc_feature 1..22: note = Targeting domain
  source 1..22: mol_type = other RNA
tcaaggcaaggctggccaaccc

SEQ ID NO: 420 - RNA, 23 nt, synthetic construct
  misc_feature 1..23: note = Targeting domain
  source 1..23: mol_type = other RNA
gtcaaggcaaggctggccaaccc

SEQ ID NO: 421 - RNA, 24 nt, synthetic construct
  misc_feature 1..24: note = Targeting domain
  source 1..24: mol_type = other RNA
ggtcaaggcaaggctggccaaccc

SEQ ID NO: 422 - RNA, 18 nt, synthetic construct
  misc_feature 1..18: note = Targeting domain
  source 1..18: mol_type = other RNA
ggctggccaacccatggg

SEQ ID NO: 423 - RNA, 19 nt, synthetic construct
  misc_feature 1..19: note = Targeting domain
  source 1..19: mol_type = other RNA
aggctggccaacccatggg

SEQ ID NO: 424 - RNA, 21 nt, synthetic construct
  misc_feature 1..21: note = Targeting domain
  source 1..21: mol_type = other RNA
caaggctggccaacccatggg

SEQ ID NO: 425 - RNA, 22 nt, synthetic construct
  misc_feature 1..22: note = Targeting domain
  source 1..22: mol_type = other RNA
gcaaggctggccaacccatggg

SEQ ID NO: 426 - RNA, 23 nt, synthetic construct
  misc_feature 1..23: note = Targeting domain
  source 1..23: mol_type = other RNA
ggcaaggctggccaacccatggg

SEQ ID NO: 427 - RNA, 24 nt, synthetic construct
  misc_feature 1..24: note = Targeting domain
  source 1..24: mol_type = other RNA
aggcaaggctggccaacccatggg

SEQ ID NO: 428 - RNA, 18 nt, synthetic construct
  misc_feature 1..18: note = Targeting domain
  source 1..18: mol_type = other RNA
gagtgtgtggaactgctg

SEQ ID NO: 429 - RNA, 19 nt, synthetic construct
  misc_feature 1..19: note = Targeting domain
  source 1..19: mol_type = other RNA
cgagtgtgtggaactgctg

SEQ ID NO: 430 - RNA, 20 nt, synthetic construct
  misc_feature 1..20: note = Targeting domain
  source 1..20: mol_type = other RNA
gcgagtgtgtggaactgctg

SEQ ID NO: 431 - RNA, 21 nt, synthetic construct
  misc_feature 1..21: note = Targeting domain
  source 1..21: mol_type = other RNA
agcgagtgtgtggaactgctg

SEQ ID NO: 432 - RNA, 22 nt, synthetic construct
  misc_feature 1..22: note = Targeting domain
  source 1..22: mol_type = other RNA
aagcgagtgtgtggaactgctg

SEQ ID NO: 433 - RNA, 23 nt, synthetic construct
  misc_feature 1..23: note = Targeting domain
  source 1..23: mol_type = other RNA
gaagcgagtgtgtggaactgctg

SEQ ID NO: 434 - RNA, 24 nt, synthetic construct
  misc_feature 1..24: note = Targeting domain
  source 1..24: mol_type = other RNA
agaagcgagtgtgtggaactgctg

SEQ ID NO: 435 - RNA, 18 nt, synthetic construct
  misc_feature 1..18: note = Targeting domain
  source 1..18: mol_type = other RNA
cctggctaaactccaccc

SEQ ID NO: 436 - RNA, 19 nt, synthetic construct
  misc_feature 1..19: note = Targeting domain
  source 1..19: mol_type = other RNA
ccctggctaaactccaccc

SEQ ID NO: 437 - RNA, 20 nt, synthetic construct
  misc_feature 1..20: note = Targeting domain
  source 1..20: mol_type = other RNA
tccctggctaaactccaccc

SEQ ID NO: 438 - RNA, 21 nt, synthetic construct
  misc_feature 1..21: note = Targeting domain
  source 1..21: mol_type = other RNA
gtccctggctaaactccaccc

SEQ ID NO: 439 - RNA, 22 nt, synthetic construct
  misc_feature 1..22: note = Targeting domain
  source 1..22: mol_type = other RNA
ggtccctggctaaactccaccc

SEQ ID NO: 440 - RNA, 23 nt, synthetic construct
  misc_feature 1..23: note = Targeting domain
  source 1..23: mol_type = other RNA
cggtccctggctaaactccaccc

SEQ ID NO: 441 - RNA, 24 nt, synthetic construct
  misc_feature 1..24: note = Targeting domain
  source 1..24: mol_type = other RNA
acggtccctggctaaactccaccc

SEQ ID NO: 442 - RNA, 18 nt, synthetic construct
  misc_feature 1..18: note = Targeting domain
  source 1..18: mol_type = other RNA
ggcggctggctagggatg

SEQ ID NO: 443 - RNA, 19 nt, synthetic construct
  misc_feature 1..19: note = Targeting domain
  source 1..19: mol_type = other RNA
cggcggctggctagggatg

SEQ ID NO: 444 - RNA, 20 nt, synthetic construct
  misc_feature 1..20: note = Targeting domain
  source 1..20: mol_type = other RNA
ccggcggctggctagggatg

SEQ ID NO: 445 - RNA, 21 nt, synthetic construct
  misc_feature 1..21: note = Targeting domain
  source 1..21: mol_type = other RNA
gccggcggctggctagggatg

SEQ ID NO: 446 - RNA, 22 nt, synthetic construct
  misc_feature 1..22: note = Targeting domain
  source 1..22: mol_type = other RNA
ggccggcggctggctagggatg

SEQ ID NO: 447 - RNA, 23 nt, synthetic construct
  misc_feature 1..23: note = Targeting domain
  source 1..23: mol_type = other RNA
gggccggcggctggctagggatg

SEQ ID NO: 448 - RNA, 24 nt, synthetic construct
  misc_feature 1..24: note = Targeting domain
  source 1..24: mol_type = other RNA
ggggccggcggctggctagggatg

SEQ ID NO: 449 - RNA, 18 nt, synthetic construct
  misc_feature 1..18: note = Targeting domain
  source 1..18: mol_type = other RNA
aggggccggcggctggct

SEQ ID NO: 450 - RNA, 19 nt, synthetic construct
  misc_feature 1..19: note = Targeting domain
  source 1..19: mol_type = other RNA
caggggccggcggctggct

SEQ ID NO: 451 - RNA, 21 nt, synthetic construct
  misc_feature 1..21: note = Targeting domain
  source 1..21: mol_type = other RNA
gccaggggccggcggctggct

SEQ ID NO: 452 - RNA, 22 nt, synthetic construct
  misc_feature 1..22: note = Targeting domain
  source 1..22: mol_type = other RNA
ggccaggggccggcggctggct

SEQ ID NO: 453 - RNA, 23 nt, synthetic construct
  misc_feature 1..23: note = Targeting domain
  source 1..23: mol_type = other RNA
aggccaggggccggcggctggct

SEQ ID NO: 454 - RNA, 24 nt, synthetic construct
  misc_feature 1..24: note = Targeting domain
  source 1..24: mol_type = other RNA
gaggccaggggccggcggctggct

SEQ ID NO: 455 - RNA, 18 nt, synthetic construct
  misc_feature 1..18: note = Targeting domain
  source 1..18: mol_type = other RNA
aaacttgaccaatagtct

SEQ ID NO: 456 - RNA, 19 nt, synthetic construct
  misc_feature 1..19: note = Targeting domain
  source 1..19: mol_type = other RNA
caaacttgaccaatagtct

SEQ ID NO: 457 - RNA, 20 nt, synthetic construct
  misc_feature 1..20: note = Targeting domain
  source 1..20: mol_type = other RNA
gcaaacttgaccaatagtct

SEQ ID NO: 458 - RNA, 21 nt, synthetic construct
  misc_feature 1..21: note = Targeting domain
  source 1..21: mol_type = other RNA
ggcaaacttgaccaatagtct

SEQ ID NO: 459 - RNA, 22 nt, synthetic construct
  misc_feature 1..22: note = Targeting domain
  source 1..22: mol_type = other RNA
aggcaaacttgaccaatagtct

SEQ ID NO: 460 - RNA, 23 nt, synthetic construct
  misc_feature 1..23: note = Targeting domain
  source 1..23: mol_type = other RNA
aaggcaaacttgaccaatagtct

SEQ ID NO: 461 - RNA, 24 nt, synthetic construct
  misc_feature 1..24: note = Targeting domain
  source 1..24: mol_type = other RNA
caaggcaaacttgaccaatagtct

SEQ ID NO: 462 - RNA, 18 nt, synthetic construct
  misc_feature 1..18: note = Targeting domain
  source 1..18: mol_type = other RNA
ttcagacagatatttgca

SEQ ID NO: 463 - RNA, 19 nt, synthetic construct
  misc_feature 1..19: note = Targeting domain
  source 1..19: mol_type = other RNA
tttcagacagatatttgca

SEQ ID NO: 464 - RNA, 20 nt, synthetic construct
  misc_feature 1..20: note = Targeting domain
  source 1..20: mol_type = other RNA
gtttcagacagatatttgca

SEQ ID NO: 465 - RNA, 21 nt, synthetic construct
  misc_feature 1..21: note = Targeting domain
  source 1..21: mol_type = other RNA
cgtttcagacagatatttgca

SEQ ID NO: 466 - RNA, 22 nt, synthetic construct
  misc_feature 1..22: note = Targeting domain
  source 1..22: mol_type = other RNA
ccgtttcagacagatatttgca

SEQ ID NO: 467 - RNA, 23 nt, synthetic construct
  misc_feature 1..23: note = Targeting domain
  source 1..23: mol_type = other RNA
accgtttcagacagatatttgca

SEQ ID NO: 468 - RNA, 24 nt, synthetic construct
  misc_feature 1..24: note = Targeting domain
  source 1..24: mol_type = other RNA
gaccgtttcagacagatatttgca

SEQ ID NO: 469 - RNA, 18 nt, synthetic construct
  misc_feature 1..18: note = Targeting domain
  source 1..18: mol_type = other RNA
agtttccttctcccatca

SEQ ID NO: 470 - RNA, 19 nt, synthetic construct
  misc_feature 1..19: note = Targeting domain
  source 1..19: mol_type = other RNA
tagtttccttctcccatca

SEQ ID NO: 471 - RNA, 20 nt, synthetic construct
  misc_feature 1..20: note = Targeting domain
  source 1..20: mol_type = other RNA
ctagtttccttctcccatca

SEQ ID NO: 472 - RNA, 21 nt, synthetic construct
  misc_feature 1..21: note = Targeting domain
  source 1..21: mol_type = other RNA
gctagtttccttctcccatca

SEQ ID NO: 473 - RNA, 22 nt, synthetic construct
  misc_feature 1..22: note = Targeting domain
  source 1..22: mol_type = other RNA
agctagtttccttctcccatca

SEQ ID NO: 474 - RNA, 23 nt, synthetic construct
  misc_feature 1..23: note = Targeting domain
  source 1..23: mol_type = other RNA
tagctagtttccttctcccatca

SEQ ID NO: 475 - RNA, 24 nt, synthetic construct
  misc_feature 1..24: note = Targeting domain
  source 1..24: mol_type = other RNA
ttagctagtttccttctcccatca

SEQ ID NO: 476 - RNA, 18 nt, synthetic construct
  misc_feature 1..18: note = Targeting domain
  source 1..18: mol_type = other RNA
attgagatagtgtgggga

SEQ ID NO: 477 - RNA, 19 nt, synthetic construct
  misc_feature 1..19: note = Targeting domain
  source 1..19: mol_type = other RNA
cattgagatagtgtgggga

SEQ ID NO: 478 - RNA, 21 nt, synthetic construct
  misc_feature 1..21: note = Targeting domain
  source 1..21: mol_type = other RNA
tgcattgagatagtgtgggga

SEQ ID NO: 479 - RNA, 22 nt, synthetic construct
  misc_feature 1..22: note = Targeting domain
  source 1..22: mol_type = other RNA
ttgcattgagatagtgtgggga

SEQ ID NO: 480 - RNA, 23 nt, synthetic construct
  misc_feature 1..23: note = Targeting domain
  source 1..23: mol_type = other RNA
tttgcattgagatagtgtgggga

SEQ ID NO: 481 - RNA, 24 nt, synthetic construct
  misc_feature 1..24: note = Targeting domain
  source 1..24: mol_type = other RNA
atttgcattgagatagtgtgggga

SEQ ID NO: 482 - RNA, 18 nt, synthetic construct
  misc_feature 1..18: note = Targeting domain
  source 1..18: mol_type = other RNA
tcccatcatagaggatac

SEQ ID NO: 483 - RNA, 19 nt, synthetic construct
  misc_feature 1..19: note = Targeting domain
  source 1..19: mol_type = other RNA
ctcccatcatagaggatac

SEQ ID NO: 484 - RNA, 20 nt, synthetic construct
  misc_feature 1..20: note = Targeting domain
  source 1..20: mol_type = other RNA
tctcccatcatagaggatac

SEQ ID NO: 485 - RNA, 21 nt, synthetic construct
  misc_feature 1..21: note = Targeting domain
  source 1..21: mol_type = other RNA
ttctcccatcatagaggatac

SEQ ID NO: 486 - RNA, 22 nt, synthetic construct
  misc_feature 1..22: note = Targeting domain
  source 1..22: mol_type = other RNA
cttctcccatcatagaggatac

SEQ ID NO: 487 - RNA, 23 nt, synthetic construct
  misc_feature 1..23: note = Targeting domain
  source 1..23: mol_type = other RNA
ccttctcccatcatagaggatac

SEQ ID NO: 488 - RNA, 24 nt, synthetic construct
  misc_feature 1..24: note = Targeting domain
  source 1..24: mol_type = other RNA
tccttctcccatcatagaggatac

SEQ ID NO: 489 - RNA, 18 nt, synthetic construct
  misc_feature 1..18: note = Targeting domain
  source 1..18: mol_type = other RNA
tgtggggaaggggccccc

SEQ ID NO: 490 - RNA, 19 nt, synthetic construct
  misc_feature 1..19: note = Targeting domain
  source 1..19: mol_type = other RNA
gtgtggggaaggggccccc

SEQ ID NO: 491 - RNA, 20 nt, synthetic construct
  misc_feature 1..20: note = Targeting domain
  source 1..20: mol_type = other RNA
agtgtggggaaggggccccc

SEQ ID NO: 492 - RNA, 21 nt, synthetic construct
  misc_feature 1..21: note = Targeting domain
  source 1..21: mol_type = other RNA
tagtgtggggaaggggccccc

SEQ ID NO: 493 - RNA, 22 nt, synthetic construct
  misc_feature 1..22: note = Targeting domain
  source 1..22: mol_type = other RNA
atagtgtggggaaggggccccc

SEQ ID NO: 494 - RNA, 23 nt, synthetic construct
  misc_feature 1..23: note = Targeting domain
  source 1..23: mol_type = other RNA
gatagtgtggggaaggggccccc

SEQ ID NO: 495 - RNA, 24 nt, synthetic construct
  misc_feature 1..24: note = Targeting domain
  source 1..24: mol_type = other RNA
agatagtgtggggaaggggccccc

SEQ ID NO: 496 - RNA, 18 nt, synthetic construct
  misc_feature 1..18: note = Targeting domain
  source 1..18: mol_type = other RNA
catgggtggagtttagcc

SEQ ID NO: 497 - RNA, 19 nt, synthetic construct
  misc_feature 1..19: note = Targeting domain
  source 1..19: mol_type = other RNA
ccatgggtggagtttagcc

SEQ ID NO: 498 - RNA, 21 nt, synthetic construct
  misc_feature 1..21: note = Targeting domain
  source 1..21: mol_type = other RNA
acccatgggtggagtttagcc

SEQ ID NO: 499 - RNA, 22 nt, synthetic construct
  misc_feature 1..22: note = Targeting domain
  source 1..22: mol_type = other RNA
aacccatgggtggagtttagcc

SEQ ID NO: 500 - RNA, 23 nt, synthetic construct
  misc_feature 1..23: note = Targeting domain
  source 1..23: mol_type = other RNA
caacccatgggtggagtttagcc

SEQ ID NO: 501 - RNA, 24 nt, synthetic construct
  misc_feature 1..24: note = Targeting domain
  source 1..24: mol_type = other RNA
ccaacccatgggtggagtttagcc

SEQ ID NO: 502 - RNA, 18 nt, synthetic construct
  misc_feature 1..18: note = Targeting domain
  source 1..18: mol_type = other RNA
ccatgggtggagtttagc

SEQ ID NO: 503 - RNA, 19 nt, synthetic construct
  misc_feature 1..19: note = Targeting domain
  source 1..19: mol_type = other RNA
cccatgggtggagtttagc

SEQ ID NO: 504 - RNA, 20 nt, synthetic construct
  misc_feature 1..20: note = Targeting domain
  source 1..20: mol_type = other RNA
acccatgggtggagtttagc

SEQ ID NO: 505 - RNA, 21 nt, synthetic construct
  misc_feature 1..21: note = Targeting domain
  source 1..21: mol_type = other RNA
aacccatgggtggagtttagc

SEQ ID NO: 506 - RNA, 22 nt, synthetic construct
  misc_feature 1..22: note = Targeting domain
  source 1..22: mol_type = other RNA
caacccatgggtggagtttagc

SEQ ID NO: 507 - RNA, 23 nt, synthetic construct
  misc_feature 1..23: note = Targeting domain
  source 1..23: mol_type = other RNA
ccaacccatgggtggagtttagc

SEQ ID NO: 508 - RNA, 24 nt, synthetic construct
  misc_feature 1..24: note = Targeting domain
  source 1..24: mol_type = other RNA
gccaacccatgggtggagtttagc

SEQ ID NO: 509 - RNA, 18 nt, synthetic construct
  misc_feature 1..18: note = Targeting domain
  source 1..18: mol_type = other RNA
tgataacctcagacgttc

SEQ ID NO: 510 - RNA, 19 nt, synthetic construct
  misc_feature 1..19: note = Targeting domain
  source 1..19: mol_type = other RNA
ttgataacctcagacgttc

SEQ ID NO: 511 - RNA, 20 nt, synthetic construct
  misc_feature 1..20: note = Targeting domain
  source 1..20: mol_type = other RNA
attgataacctcagacgttc

SEQ ID NO: 512 - RNA, 21 nt, synthetic construct
  misc_feature 1..21: note = Targeting domain
  source 1..21: mol_type = other RNA
tattgataacctcagacgttc

SEQ ID NO: 513 - RNA, 22 nt, synthetic construct
  misc_feature 1..22: note = Targeting domain
  source 1..22: mol_type = other RNA
ttattgataacctcagacgttc

SEQ ID NO: 514 - RNA, 23 nt, synthetic construct
  misc_feature 1..23: note = Targeting domain
  source 1..23: mol_type = other RNA
cttattgataacctcagacgttc

SEQ ID NO: 515 - RNA, 24 nt, synthetic construct
  misc_feature 1..24: note = Targeting domain
  source 1..24: mol_type = other RNA
gcttattgataacctcagacgttc

SEQ ID NO: 516 - RNA, 18 nt, synthetic construct
  misc_feature 1..18: note = Targeting domain
  source 1..18: mol_type = other RNA
cattgagatagtgtgggg

SEQ ID NO: 517 - RNA, 19 nt, synthetic construct
  misc_feature 1..19: note = Targeting domain
  source 1..19: mol_type = other RNA
gcattgagatagtgtgggg

SEQ ID NO: 518 - RNA, 20 nt, synthetic construct
  misc_feature 1..20: note = Targeting domain
  source 1..20: mol_type = other RNA
tgcattgagatagtgtgggg

SEQ ID NO: 519 - RNA, 21 nt, synthetic construct
  misc_feature 1..21: note = Targeting domain
  source 1..21: mol_type = other RNA
ttgcattgagatagtgtgggg

SEQ ID NO: 520 - RNA, 22 nt, synthetic construct
  misc_feature 1..22: note = Targeting domain
  source 1..22: mol_type = other RNA
tttgcattgagatagtgtgggg

SEQ ID NO: 521 - RNA, 23 nt, synthetic construct
  misc_feature 1..23: note = Targeting domain
  source 1..23: mol_type = other RNA
atttgcattgagatagtgtgggg

SEQ ID NO: 522 - RNA, 24 nt, synthetic construct
  misc_feature 1..24: note = Targeting domain
  source 1..24: mol_type = other RNA
tatttgcattgagatagtgtgggg

SEQ ID NO: 523 - RNA, 18 nt, synthetic construct
  misc_feature 1..18: note = Targeting domain
  source 1..18: mol_type = other RNA
aggctggccaacccatgg

SEQ ID NO: 524 - RNA, 19 nt, synthetic construct
  misc_feature 1..19: note = Targeting domain
  source 1..19: mol_type = other RNA
aaggctggccaacccatgg

SEQ ID NO: 525 - RNA, 20 nt, synthetic construct
  misc_feature 1..20: note = Targeting domain
  source 1..20: mol_type = other RNA
caaggctggccaacccatgg

SEQ ID NO: 526 - RNA, 21 nt, synthetic construct
  misc_feature 1..21: note = Targeting domain
  source 1..21: mol_type = other RNA
gcaaggctggccaacccatgg

SEQ ID NO: 527 - RNA, 22 nt, synthetic construct
  misc_feature 1..22: note = Targeting domain
  source 1..22: mol_type = other RNA
ggcaaggctggccaacccatgg

SEQ ID NO: 528 - RNA, 23 nt, synthetic construct
  misc_feature 1..23: note = Targeting domain
  source 1..23: mol_type = other RNA
aggcaaggctggccaacccatgg

SEQ ID NO: 529 - RNA, 24 nt, synthetic construct
  misc_feature 1..24: note = Targeting domain
  source 1..24: mol_type = other RNA
aaggcaaggctggccaacccatgg

SEQ ID NO: 530 - RNA, 18 nt, synthetic construct
  misc_feature 1..18: note = Targeting domain
  source 1..18: mol_type = other RNA
agcgagtgtgtggaactg

SEQ ID NO: 531 - RNA, 19 nt, synthetic construct
  misc_feature 1..19: note = Targeting domain
  source 1..19: mol_type = other RNA
aagcgagtgtgtggaactg

SEQ ID NO: 532 - RNA, 20 nt, synthetic construct
  misc_feature 1..20: note = Targeting domain
  source 1..20: mol_type = other RNA
gaagcgagtgtgtggaactg

SEQ ID NO: 533 - RNA, 21 nt, synthetic construct
  misc_feature 1..21: note = Targeting domain
  source 1..21: mol_type = other RNA
agaagcgagtgtgtggaactg

SEQ ID NO: 534 - RNA, 22 nt, synthetic construct
  misc_feature 1..22: note = Targeting domain
  source 1..22: mol_type = other RNA
cagaagcgagtgtgtggaactg

SEQ ID NO: 535 - RNA, 23 nt, synthetic construct
  misc_feature 1..23: note = Targeting domain
  source 1..23: mol_type = other RNA
ccagaagcgagtgtgtggaactg

SEQ ID NO: 536 - RNA, 24 nt, synthetic construct
  misc_feature 1..24: note = Targeting domain
  source 1..24: mol_type = other RNA
tccagaagcgagtgtgtggaactg

SEQ ID NO: 537 - RNA, 18 nt, synthetic construct
  misc_feature 1..18: note = Targeting domain
  source 1..18: mol_type = other RNA
atttgcattgagatagtg

SEQ ID NO: 538 - RNA, 19 nt, synthetic construct
  misc_feature 1..19: note = Targeting domain
  source 1..19: mol_type = other RNA
tatttgcattgagatagtg

SEQ ID NO: 539 - RNA, 21 nt, synthetic construct
  misc_feature 1..21: note = Targeting domain
  source 1..21: mol_type = other RNA
gatatttgcattgagatagtg

SEQ ID NO: 540 - RNA, 22 nt, synthetic construct
  misc_feature 1..22: note = Targeting domain
  source 1..22: mol_type = other RNA
agatatttgcattgagatagtg

SEQ ID NO: 541 - RNA, 23 nt, synthetic construct
  misc_feature 1..23: note = Targeting domain
  source 1..23: mol_type = other RNA
cagatatttgcattgagatagtg

SEQ ID NO: 542 - RNA, 24 nt, synthetic construct
  misc_feature 1..24: note = Targeting domain
  source 1..24: mol_type = other RNA
acagatatttgcattgagatagtg

SEQ ID NO: 543 - RNA, 18 nt, synthetic construct
  misc_feature 1..18: note = Targeting domain
  source 1..18: mol_type = other RNA
gttccagaagcgagtgtg

SEQ ID NO: 544 - RNA, 19 nt, synthetic construct
  misc_feature 1..19: note = Targeting domain
  source 1..19: mol_type = other RNA
cgttccagaagcgagtgtg

SEQ ID NO: 545 - RNA, 21 nt, synthetic construct
  misc_feature 1..21: note = Targeting domain
  source 1..21: mol_type = other RNA
gacgttccagaagcgagtgtg

SEQ ID NO: 546 - RNA, 22 nt, synthetic construct
  misc_feature 1..22: note = Targeting domain
  source 1..22: mol_type = other RNA
agacgttccagaagcgagtgtg

SEQ ID NO: 547 - RNA, 23 nt, synthetic construct
  misc_feature 1..23: note = Targeting domain
  source 1..23: mol_type = other RNA
cagacgttccagaagcgagtgtg

SEQ ID NO: 548 - RNA, 24 nt, synthetic construct
  misc_feature 1..24: note = Targeting domain
  source 1..24: mol_type = other RNA
tcagacgttccagaagcgagtgtg

SEQ ID NO: 549 - RNA, 18 nt, synthetic construct
  misc_feature 1..18: note = Targeting domain
  source 1..18: mol_type = other RNA
ttgcattgagatagtgtg

SEQ ID NO: 550 - RNA, 19 nt, synthetic construct
  misc_feature 1..19: note = Targeting domain
  source 1..19: mol_type = other RNA
tttgcattgagatagtgtg

SEQ ID NO: 551 - RNA, 21 nt, synthetic construct
  misc_feature 1..21: note = Targeting domain
  source 1..21: mol_type = other RNA
tatttgcattgagatagtgtg

SEQ ID NO: 552 - RNA, 22 nt, synthetic construct
  misc_feature 1..22: note = Targeting domain
  source 1..22: mol_type = other RNA
atatttgcattgagatagtgtg

SEQ ID NO: 553 - RNA, 23 nt, synthetic construct
  misc_feature 1..23: note = Targeting domain
  source 1..23: mol_type = other RNA
gatatttgcattgagatagtgtg

SEQ ID NO: 554 - RNA, 24 nt, synthetic construct
  misc_feature 1..24: note = Targeting domain
  source 1..24: mol_type = other RNA
agatatttgcattgagatagtgtg

SEQ ID NO: 555 - RNA, 18 nt, synthetic construct
  misc_feature 1..18: note = Targeting domain
  source 1..18: mol_type = other RNA
tatttgcattgagatagt

SEQ ID NO: 556 - RNA, 19 nt, synthetic construct
  misc_feature 1..19: note = Targeting domain
  source 1..19: mol_type = other RNA
atatttgcattgagatagt

SEQ ID NO: 557 - RNA, 20 nt, synthetic construct
  misc_feature 1..20: note = Targeting domain
  source 1..20: mol_type = other RNA
gatatttgcattgagatagt

SEQ ID NO: 558 - RNA, 21 nt, synthetic construct
  misc_feature 1..21: note = Targeting domain
  source 1..21: mol_type = other RNA
agatatttgcattgagatagt

SEQ ID NO: 559 - RNA, 22 nt, synthetic construct
  misc_feature 1..22: note = Targeting domain
  source 1..22: mol_type = other RNA
cagatatttgcattgagatagt

SEQ ID NO: 560 - RNA, 23 nt, synthetic construct
  misc_feature 1..23: note = Targeting domain
  source 1..23: mol_type = other RNA
acagatatttgcattgagatagt

SEQ ID NO: 561 - RNA, 24 nt, synthetic construct
  misc_feature 1..24: note = Targeting domain
  source 1..24: mol_type = other RNA
gacagatatttgcattgagatagt

SEQ ID NO: 562 - RNA, 18 nt, synthetic construct
  misc_feature 1..18: note = Targeting domain
  source 1..18: mol_type = other RNA
cgttccagaagcgagtgt

SEQ ID NO: 563 - RNA, 19 nt, synthetic construct
  misc_feature 1..19: note = Targeting domain
  source 1..19: mol_type = other RNA
acgttccagaagcgagtgt

SEQ ID NO: 564 - RNA, 20 nt, synthetic construct
  misc_feature 1..20: note = Targeting domain
  source 1..20: mol_type = other RNA
gacgttccagaagcgagtgt

SEQ ID NO: 565 - RNA, 21 nt, synthetic construct
  misc_feature 1..21: note = Targeting domain
  source 1..21: mol_type = other RNA
agacgttccagaagcgagtgt

SEQ ID NO: 566 - RNA, 22 nt, synthetic construct
  misc_feature 1..22: note = Targeting domain
  source 1..22: mol_type = other RNA
cagacgttccagaagcgagtgt

SEQ ID NO: 567 - RNA, 23 nt, synthetic construct
  misc_feature 1..23: note = Targeting domain
  source 1..23: mol_type = other RNA
tcagacgttccagaagcgagtgt

SEQ ID NO: 568 - RNA, 24 nt, synthetic construct
  misc_feature 1..24: note = Targeting domain
  source 1..24: mol_type = other RNA
ctcagacgttccagaagcgagtgt

SEQ ID NO: 569 - RNA, 18 nt, synthetic construct
  misc_feature 1..18: note = Targeting domain
  source 1..18: mol_type = other RNA
tttgcattgagatagtgt

SEQ ID NO: 570 - RNA, 19 nt, synthetic construct
  misc_feature 1..19: note = Targeting domain
  source 1..19: mol_type = other RNA
atttgcattgagatagtgt

SEQ ID NO: 571 - RNA, 21 nt, synthetic construct
  misc_feature 1..21: note = Targeting domain
  source 1..21: mol_type = other RNA
atatttgcattgagatagtgt

SEQ ID NO: 572 - RNA, 22 nt, synthetic construct
  misc_feature 1..22: note = Targeting domain
  source 1..22: mol_type = other RNA
gatatttgcattgagatagtgt

SEQ ID NO: 573 - RNA, 23 nt, synthetic construct
  misc_feature 1..23: note = Targeting domain
  source 1..23: mol_type = other RNA
agatatttgcattgagatagtgt

SEQ ID NO: 574 - RNA, 24 nt, synthetic construct
  misc_feature 1..24: note = Targeting domain
  source 1..24: mol_type = other RNA
cagatatttgcattgagatagtgt

SEQ ID NO: 575 - RNA, 18 nt, synthetic construct
  misc_feature 1..18: note = Targeting domain
  source 1..18: mol_type = other RNA
gaataaattagagaaaaa

SEQ ID NO: 576 - RNA, 19 nt, synthetic construct
  misc_feature 1..19: note = Targeting domain
  source 1..19: mol_type = other RNA
agaataaattagagaaaaa

SEQ ID NO: 577 - RNA, 20 nt, synthetic construct
  misc_feature 1..20: note = Targeting domain
  source 1..20: mol_type = other RNA
aagaataaattagagaaaaa

SEQ ID NO: 578 - RNA, 21 nt, synthetic construct
  misc_feature 1..21: note = Targeting domain
  source 1..21: mol_type = other RNA
gaagaataaattagagaaaaa

SEQ ID NO: 579 - RNA, 22 nt, synthetic construct
  misc_feature 1..22: note = Targeting domain
  source 1..22: mol_type = other RNA
ggaagaataaattagagaaaaa

SEQ ID NO: 580 - RNA, 23 nt, synthetic construct
  misc_feature 1..23: note = Targeting domain
  source 1..23: mol_type = other RNA
gggaagaataaattagagaaaaa

SEQ ID NO: 581 - RNA, 24 nt, synthetic construct
  misc_feature 1..24: note = Targeting domain
  source 1..24: mol_type = other RNA
agggaagaataaattagagaaaaa

SEQ ID NO: 582 - RNA, 18 nt, synthetic construct
  misc_feature 1..18: note = Targeting domain
  source 1..18: mol_type = other RNA
ctagggatgaagaataaa

SEQ ID NO: 583 - RNA, 19 nt, synthetic construct
  misc_feature 1..19: note = Targeting domain
  source 1..19: mol_type = other RNA
gctagggatgaagaataaa

SEQ ID NO: 584 - RNA, 21 nt, synthetic construct
  misc_feature 1..21: note = Targeting domain
  source 1..21: mol_type = other RNA
tggctagggatgaagaataaa

SEQ ID NO: 585 - RNA, 22 nt, synthetic construct
  misc_feature 1..22: note = Targeting domain
  source 1..22: mol_type = other RNA
ctggctagggatgaagaataaa

SEQ ID NO: 586 - RNA, 23 nt, synthetic construct
  misc_feature 1..23: note = Targeting domain
  source 1..23: mol_type = other RNA
gctggctagggatgaagaataaa

SEQ ID NO: 587 - RNA, 24 nt, synthetic construct
  misc_feature 1..24: note = Targeting domain
  source 1..24: mol_type = other RNA
ggctggctagggatgaagaataaa

SEQ ID NO: 588 - RNA, 18 nt, synthetic construct
  misc_feature 1..18: note = Targeting domain
  source 1..18: mol_type = other RNA
agaaggaaactagctaaa

SEQ ID NO: 589 - RNA, 19 nt, synthetic construct
  misc_feature 1..19: note = Targeting domain
  source 1..19: mol_type = other RNA
gagaaggaaactagctaaa

SEQ ID NO: 590 - RNA, 21 nt, synthetic construct
  misc_feature 1..21: note = Targeting domain
  source 1..21: mol_type = other RNA
gggagaaggaaactagctaaa

SEQ ID NO: 591 - RNA, 22 nt, synthetic construct
  misc_feature 1..22: note = Targeting domain
  source 1..22: mol_type = other RNA
tgggagaaggaaactagctaaa

SEQ ID NO: 592 - RNA, 23 nt, synthetic construct
  misc_feature 1..23: note = Targeting domain
  source 1..23: mol_type = other RNA
atgggagaaggaaactagctaaa

SEQ ID NO: 593 - RNA, 24 nt, synthetic construct
  misc_feature 1..24: note = Targeting domain
  source 1..24: mol_type = other RNA
gatgggagaaggaaactagctaaa

SEQ ID NO: 594 - RNA, 18 nt, synthetic construct
  misc_feature 1..18: note = Targeting domain
  source 1..18: mol_type = other RNA
aaaactggaatgactgaa

SEQ ID NO: 595 - RNA, 19 nt, synthetic construct
  misc_feature 1..19: note = Targeting domain
  source 1..19: mol_type = other RNA
aaaaactggaatgactgaa

SEQ ID NO: 596 - RNA, 20 nt, synthetic construct
  misc_feature 1..20: note = Targeting domain
  source 1..20: mol_type = other RNA
gaaaaactggaatgactgaa

SEQ ID NO: 597 - RNA, 21 nt, synthetic construct
  misc_feature 1..21: note = Targeting domain
  source 1..21: mol_type = other RNA
agaaaaactggaatgactgaa

SEQ ID NO: 598 - RNA, 22 nt, synthetic construct
  misc_feature 1..22: note = Targeting domain
  source 1..22: mol_type = other RNA
gagaaaaactggaatgactgaa

SEQ ID NO: 599 - RNA, 23 nt, synthetic construct
  misc_feature 1..23: note = Targeting domain
  source 1..23: mol_type = other RNA
agagaaaaactggaatgactgaa

SEQ ID NO: 600 - RNA, 24 nt, synthetic construct
  misc_feature 1..24: note = Targeting domain
  source 1..24: mol_type = other RNA
tagagaaaaactggaatgactgaa

SEQ ID NO: 601 - RNA, 18 nt, synthetic construct
  misc_feature 1..18: note = Targeting domain
  source 1..18: mol_type = other RNA
gctagggatgaagaataa

SEQ ID NO: 602 - RNA, 19 nt, synthetic construct
  misc_feature 1..19: note = Targeting domain
  source 1..19: mol_type = other RNA
ggctagggatgaagaataa

SEQ ID NO: 603 - RNA, 20 nt, synthetic construct
  misc_feature 1..20: note = Targeting domain
  source 1..20: mol_type = other RNA
tggctagggatgaagaataa

SEQ ID NO: 604 - RNA, 21 nt, synthetic construct
  misc_feature 1..21: note = Targeting domain
  source 1..21: mol_type = other RNA
ctggctagggatgaagaataa

SEQ ID NO: 605 - RNA, 22 nt, synthetic construct
  misc_feature 1..22: note = Targeting domain
  source 1..22: mol_type = other RNA
gctggctagggatgaagaataa

SEQ ID NO: 606 - RNA, 23 nt, synthetic construct
  misc_feature 1..23: note = Targeting domain
  source 1..23: mol_type = other RNA
ggctggctagggatgaagaataa

SEQ ID NO: 607 - RNA, 24 nt, synthetic construct
  misc_feature 1..24: note = Targeting domain
  source 1..24: mol_type = other RNA
cggctggctagggatgaagaataa

SEQ ID NO: 608 - RNA, 18 nt, synthetic construct
  misc_feature 1..18: note = Targeting domain
  source 1..18: mol_type = other RNA
gagaaggaaactagctaa

SEQ ID NO: 609 - RNA, 19 nt, synthetic construct
  misc_feature 1..19: note = Targeting domain
  source 1..19: mol_type = other RNA
ggagaaggaaactagctaa

SEQ ID NO: 610 - RNA, 21 nt, synthetic construct
  misc_feature 1..21: note = Targeting domain
  source 1..21: mol_type = other RNA
tgggagaaggaaactagctaa

SEQ ID NO: 611 - RNA, 22 nt, synthetic construct
  misc_feature 1..22: note = Targeting domain
  source 1..22: mol_type = other RNA
atgggagaaggaaactagctaa

SEQ ID NO: 612 - RNA, 23 nt, synthetic construct
  misc_feature 1..23: note = Targeting domain
  source 1..23: mol_type = other RNA
gatgggagaaggaaactagctaa

SEQ ID NO: 613 - RNA, 24 nt, synthetic construct
  misc_feature 1..24: note = Targeting domain
  source 1..24: mol_type = other RNA
tgatgggagaaggaaactagctaa

SEQ ID NO: 614 - RNA, 18 nt, synthetic construct
  misc_feature 1..18: note = Targeting domain
  source 1..18: mol_type = other RNA
atagtcttagagtatcca

SEQ ID NO: 615 - RNA, 19 nt, synthetic construct
  misc_feature 1..19: note = Targeting domain
  source 1..19: mol_type = other RNA
aatagtcttagagtatcca

SEQ ID NO: 616 - RNA, 20 nt, synthetic construct
  misc_feature 1..20: note = Targeting domain
  source 1..20: mol_type = other RNA
caatagtcttagagtatcca

SEQ ID NO: 617 - RNA, 21 nt, synthetic construct
  misc_feature 1..21: note = Targeting domain
  source 1..21: mol_type = other RNA
ccaatagtcttagagtatcca

SEQ ID NO: 618 - RNA, 22 nt, synthetic construct
  misc_feature 1..22: note = Targeting domain
  source 1..22: mol_type = other RNA
accaatagtcttagagtatcca

SEQ ID NO: 619 - RNA, 23 nt, synthetic construct
  misc_feature 1..23: note = Targeting domain
  source 1..23: mol_type = other RNA
gaccaatagtcttagagtatcca

SEQ ID NO: 620 - RNA, 24 nt, synthetic construct
  misc_feature 1..24: note = Targeting domain
  source 1..24: mol_type = other RNA
tgaccaatagtcttagagtatcca

SEQ ID NO: 621 - RNA, 18 nt, synthetic construct
  misc_feature 1..18: note = Targeting domain
  source 1..18: mol_type = other RNA
atcctctatgatgggaga

SEQ ID NO: 622 - RNA, 19 nt, synthetic construct
  misc_feature 1..19: note = Targeting domain
  source 1..19: mol_type = other RNA
tatcctctatgatgggaga

SEQ ID NO: 623 - RNA, 21 nt, synthetic construct
  misc_feature 1..21: note = Targeting domain
  source 1..21: mol_type = other RNA
ggtatcctctatgatgggaga

SEQ ID NO: 624 - RNA, 22 nt, synthetic construct
  misc_feature 1..22: note = Targeting domain
  source 1..22: mol_type = other RNA
tggtatcctctatgatgggaga

SEQ ID NO: 625 - RNA, 23 nt, synthetic construct
  misc_feature 1..23: note = Targeting domain
  source 1..23: mol_type = other RNA
ctggtatcctctatgatgggaga

SEQ ID NO: 626 - RNA, 24 nt, synthetic construct
  misc_feature 1..24: note = Targeting domain
  source 1..24: mol_type = other RNA
cctggtatcctctatgatgggaga

SEQ ID NO: 627 - RNA, 18 nt, synthetic construct
  misc_feature 1..18: note = Targeting domain
  source 1..18: mol_type = other RNA
tcctggtatcctctatga

SEQ ID NO: 628 - RNA, 19 nt, synthetic construct
  misc_feature 1..19: note = Targeting domain
  source 1..19: mol_type = other RNA
gtcctggtatcctctatga

SEQ ID NO: 629 - RNA, 21 nt, synthetic construct
  misc_feature 1..21: note = Targeting domain
  source 1..21: mol_type = other RNA
aagtcctggtatcctctatga

SEQ ID NO: 630 - RNA, 22 nt, synthetic construct
  misc_feature 1..22: note = Targeting domain
  source 1..22: mol_type = other RNA
gaagtcctggtatcctctatga

SEQ ID NO: 631 - RNA, 23 nt, synthetic construct
  misc_feature 1..23: note = Targeting domain
  source 1..23: mol_type = other RNA
agaagtcctggtatcctctatga

SEQ ID NO: 632 - RNA, 24 nt, synthetic construct
  misc_feature 1..24: note = Targeting domain
  source 1..24: mol_type = other RNA
aagaagtcctggtatcctctatga

SEQ ID NO: 633 - RNA, 18 nt, synthetic construct
  misc_feature 1..18: note = Targeting domain
  source 1..18: mol_type = other RNA
ggagaaggaaactagcta

SEQ ID NO: 634 - RNA, 19 nt, synthetic construct
  misc_feature 1..19: note = Targeting domain
  source 1..19: mol_type = other RNA
gggagaaggaaactagcta

SEQ ID NO: 635 - RNA, 20 nt, synthetic construct
  misc_feature 1..20: note = Targeting domain
  source 1..20: mol_type = other RNA
tgggagaaggaaactagcta

SEQ ID NO: 636 - RNA, 21 nt, synthetic construct
  misc_feature 1..21: note = Targeting domain
  source 1..21: mol_type = other RNA
atgggagaaggaaactagcta

SEQ ID NO: 637 - RNA, 22 nt, synthetic construct
  misc_feature 1..22: note = Targeting domain
  source 1..22: mol_type = other RNA
gatgggagaaggaaactagcta

SEQ ID NO: 638 - RNA, 23 nt, synthetic construct
  misc_feature 1..23: note = Targeting domain
  source 1..23: mol_type = other RNA
tgatgggagaaggaaactagcta

SEQ ID NO: 639 - RNA, 24 nt, synthetic construct
  misc_feature 1..24: note = Targeting domain
  source 1..24: mol_type = other RNA
atgatgggagaaggaaactagcta

SEQ ID NO: 640 - RNA, 18 nt, synthetic construct
  misc_feature 1..18: note = Targeting domain
  source 1..18: mol_type = other RNA
aaagggaagaataaatta

SEQ ID NO: 641 - RNA, 19 nt, synthetic construct
  misc_feature 1..19: note = Targeting domain
  source 1..19: mol_type = other RNA
taaagggaagaataaatta

SEQ ID NO: 642 - RNA, 20 nt, synthetic construct
  misc_feature 1..20: note = Targeting domain
  source 1..20: mol_type = other RNA
ctaaagggaagaataaatta

SEQ ID NO: 643 - RNA, 21 nt, synthetic construct
  misc_feature 1..21: note = Targeting domain
  source 1..21: mol_type = other RNA
gctaaagggaagaataaatta

SEQ ID NO: 644 - RNA, 22 nt, synthetic construct
  misc_feature 1..22: note = Targeting domain
  source 1..22: mol_type = other RNA
agctaaagggaagaataaatta

SEQ ID NO: 645 - RNA, 23 nt, synthetic construct
  misc_feature 1..23: note = Targeting domain
  source 1..23: mol_type = other RNA
tagctaaagggaagaataaatta

SEQ ID NO: 646 - RNA, 24 nt, synthetic construct
  misc_feature 1..24: note = Targeting domain
  source 1..24: mol_type = other RNA
ctagctaaagggaagaataaatta

SEQ ID NO: 647 - RNA, 18 nt, synthetic construct
  misc_feature 1..18: note = Targeting domain
  source 1..18: mol_type = other RNA
agagtatccagtgaggcc

SEQ ID NO: 648 - RNA, 19 nt, synthetic construct
  misc_feature 1..19: note = Targeting domain
  source 1..19: mol_type = other RNA
tagagtatccagtgaggcc

SEQ ID NO: 649 - RNA, 21 nt, synthetic construct
  misc_feature 1..21: note = Targeting domain
  source 1..21: mol_type = other RNA
cttagagtatccagtgaggcc

SEQ ID NO: 650 - RNA, 22 nt, synthetic construct
  misc_feature 1..22: note = Targeting domain
  source 1..22: mol_type = other RNA
tcttagagtatccagtgaggcc

SEQ ID NO: 651 - RNA, 23 nt, synthetic construct
  misc_feature 1..23: note = Targeting domain
  source 1..23: mol_type = other RNA
gtcttagagtatccagtgaggcc

SEQ ID NO: 652 - RNA, 24 nt, synthetic construct
  misc_feature 1..24: note = Targeting domain
  source 1..24: mol_type = other RNA
agtcttagagtatccagtgaggcc

SEQ ID NO: 653 - RNA, 18 nt, synthetic construct
  misc_feature 1..18: note = Targeting domain
  source 1..18: mol_type = other RNA
tagagtatccagtgaggc

SEQ ID NO: 654 - RNA, 19 nt, synthetic construct
  misc_feature 1..19: note = Targeting domain
  source 1..19: mol_type = other RNA
ttagagtatccagtgaggc

SEQ ID NO: 655 - RNA, 20 nt, synthetic construct
  misc_feature 1..20: note = Targeting domain
  source 1..20: mol_type = other RNA
cttagagtatccagtgaggc

SEQ ID NO: 656 - RNA, 21 nt, synthetic construct
  misc_feature 1..21: note = Targeting domain
  source 1..21: mol_type = other RNA
tcttagagtatccagtgaggc

SEQ ID NO: 657 - RNA, 22 nt, synthetic construct
  misc_feature 1..22: note = Targeting domain
  source 1..22: mol_type = other RNA
gtcttagagtatccagtgaggc

SEQ ID NO: 658 - RNA, 23 nt, synthetic construct
  misc_feature 1..23: note = Targeting domain
  source 1..23: mol_type = other RNA
agtcttagagtatccagtgaggc

SEQ ID NO: 659 - RNA, 24 nt, synthetic construct
  misc_feature 1..24: note = Targeting domain
  source 1..24: mol_type = other RNA
tagtcttagagtatccagtgaggc

SEQ ID NO: 660 - RNA, 18 nt, synthetic construct
  misc_feature 1..18: note = Targeting domain
  source 1..18: mol_type = other RNA
caggggccggcggctggc

SEQ ID NO: 661 - RNA, 19 nt, synthetic construct
  misc_feature 1..19: note = Targeting domain
  source 1..19: mol_type = other RNA
ccaggggccggcggctggc

SEQ ID NO: 662 - RNA, 20 nt, synthetic construct
  misc_feature 1..20: note = Targeting domain
  source 1..20: mol_type = other RNA
gccaggggccggcggctggc

SEQ ID NO: 663 - RNA, 21 nt, synthetic construct
  misc_feature 1..21: note = Targeting domain
  source 1..21: mol_type = other RNA
ggccaggggccggcggctggc

SEQ ID NO: 664 - RNA, 22 nt, synthetic construct
  misc_feature 1..22: note = Targeting domain
  source 1..22: mol_type = other RNA
aggccaggggccggcggctggc

SEQ ID NO: 665 - RNA, 23 nt, synthetic construct
  misc_feature 1..23: note = Targeting domain
  source 1..23: mol_type = other RNA
gaggccaggggccggcggctggc

SEQ ID NO: 666 - RNA, 24 nt, synthetic construct
  misc_feature 1..24: note = Targeting domain
  source 1..24: mol_type = other RNA
tgaggccaggggccggcggctggc

SEQ ID NO: 667 - RNA, 18 nt, synthetic construct
  misc_feature 1..18: note = Targeting domain
  source 1..18: mol_type = other RNA
aaaattagcagtatcctc

SEQ ID NO: 668 - RNA, 19 nt, synthetic construct
  misc_feature 1..19: note = Targeting domain
  source 1..19: mol_type = other RNA
aaaaattagcagtatcctc

SEQ ID NO: 669 - RNA, 20 nt, synthetic construct
  misc_feature 1..20: note = Targeting domain
  source 1..20: mol_type = other RNA
aaaaaattagcagtatcctc

SEQ ID NO: 670 - RNA, 21 nt, synthetic construct
  misc_feature 1..21: note = Targeting domain
  source 1..21: mol_type = other RNA
aaaaaaattagcagtatcctc

SEQ ID NO: 671 - RNA, 22 nt, synthetic construct
  misc_feature 1..22: note = Targeting domain
  source 1..22: mol_type = other RNA
aaaaaaaattagcagtatcctc

SEQ ID NO: 672 - RNA, 23 nt, synthetic construct
  misc_feature 1..23: note = Targeting domain
  source 1..23: mol_type = other RNA
taaaaaaaattagcagtatcctc

SEQ ID NO: 673 - RNA, 24 nt, synthetic construct
  misc_feature 1..24: note = Targeting domain
  source 1..24: mol_type = other RNA
ataaaaaaaattagcagtatcctc

SEQ ID NO: 674 - RNA, 18 nt, synthetic construct
  misc_feature 1..18: note = Targeting domain
  source 1..18: mol_type = other RNA
gttccacacactcgcttc

SEQ ID NO: 675 - RNA, 19 nt, synthetic construct
  misc_feature 1..19: note = Targeting domain
  source 1..19: mol_type = other RNA
agttccacacactcgcttc

SEQ ID NO: 676 - RNA, 21 nt, synthetic construct
  misc_feature 1..21: note = Targeting domain
  source 1..21: mol_type = other RNA
gcagttccacacactcgcttc

SEQ ID NO: 677 - RNA, 22 nt, synthetic construct
  misc_feature 1..22: note = Targeting domain
  source 1..22: mol_type = other RNA
agcagttccacacactcgcttc

SEQ ID NO: 678 - RNA, 23 nt, synthetic construct
  misc_feature 1..23: note = Targeting domain
  source 1..23: mol_type = other RNA
cagcagttccacacactcgcttc

SEQ ID NO: 679 - RNA, 24 nt, synthetic construct
  misc_feature 1..24: note = Targeting domain
  source 1..24: mol_type = other RNA
tcagcagttccacacactcgcttc

SEQ ID NO: 680 - RNA, 18 nt, synthetic construct
  misc_feature 1..18: note = Targeting domain
  source 1..18: mol_type = other RNA
tatcctctatgatgggag

SEQ ID NO: 681 - RNA, 19 nt, synthetic construct
  misc_feature 1..19: note = Targeting domain
  source 1..19: mol_type = other RNA
gtatcctctatgatgggag

SEQ ID NO: 682 - RNA, 20 nt, synthetic construct
  misc_feature 1..20: note = Targeting domain
  source 1..20: mol_type = other RNA
ggtatcctctatgatgggag

SEQ ID NO: 683 - RNA, 21 nt, synthetic construct
  misc_feature 1..21: note = Targeting domain
  source 1..21: mol_type = other RNA
tggtatcctctatgatgggag

SEQ ID NO: 684 - RNA, 22 nt, synthetic construct
  misc_feature 1..22: note = Targeting domain
  source 1..22: mol_type = other RNA
ctggtatcctctatgatgggag

SEQ ID NO: 685 - RNA, 23 nt, synthetic construct
  misc_feature 1..23: note = Targeting domain
  source 1..23: mol_type = other RNA
cctggtatcctctatgatgggag

SEQ ID NO: 686 - RNA, 24 nt, synthetic construct
  misc_feature 1..24: note = Targeting domain
  source 1..24: mol_type = other RNA
tcctggtatcctctatgatgggag

SEQ ID NO: 687 - RNA, 18 nt, synthetic construct
  misc_feature 1..18: note = Targeting domain
  source 1..18: mol_type = other RNA
gccggcggctggctaggg

SEQ ID NO: 688 - RNA, 19 nt, synthetic construct
  misc_feature 1..19: note = Targeting domain
  source 1..19: mol_type = other RNA
ggccggcggctggctaggg

SEQ ID NO: 689 - RNA, 20 nt, synthetic construct
  misc_feature 1..20: note = Targeting domain
  source 1..20: mol_type = other RNA
gggccggcggctggctaggg

SEQ ID NO: 690 - RNA, 21 nt, synthetic construct
  misc_feature 1..21: note = Targeting domain
  source 1..21: mol_type = other RNA
ggggccggcggctggctaggg

SEQ ID NO: 691 - RNA, 22 nt, synthetic construct
  misc_feature 1..22: note = Targeting domain
  source 1..22: mol_type = other RNA
aggggccggcggctggctaggg

SEQ ID NO: 692 - RNA, 23 nt, synthetic construct
  misc_feature 1..23: note = Targeting domain
  source 1..23: mol_type = other RNA
caggggccggcggctggctaggg

SEQ ID NO: 693 - RNA, 24 nt, synthetic construct
  misc_feature 1..24: note = Targeting domain
  source 1..24: mol_type = other RNA
ccaggggccggcggctggctaggg

SEQ ID NO: 694 - RNA, 18 nt, synthetic construct
  misc_feature 1..18: note = Targeting domain
  source 1..18: mol_type = other RNA
tggtatcctctatgatgg

SEQ ID NO: 695 - RNA, 19 nt, synthetic construct
  misc_feature 1..19: note = Targeting domain
  source 1..19: mol_type = other RNA
ctggtatcctctatgatgg

SEQ ID NO: 696 - RNA, 20 nt, synthetic construct
  misc_feature 1..20: note = Targeting domain
  source 1..20: mol_type = other RNA
cctggtatcctctatgatgg

SEQ ID NO: 697 - RNA, 21 nt, synthetic construct
  misc_feature 1..21: note = Targeting domain
  source 1..21: mol_type = other RNA
tcctggtatcctctatgatgg

SEQ ID NO: 698 - RNA, 22 nt, synthetic construct
  misc_feature 1..22: note = Targeting domain
  source 1..22: mol_type = other RNA
gtcctggtatcctctatgatgg

SEQ ID NO: 699 - RNA, 23 nt, synthetic construct
  misc_feature 1..23: note = Targeting domain
  source 1..23: mol_type = other RNA
agtcctggtatcctctatgatgg

SEQ ID NO: 700 - RNA, 24 nt, synthetic construct
  misc_feature 1..24: note = Targeting domain
  source 1..24: mol_type = other RNA
aagtcctggtatcctctatgatgg

SEQ ID NO: 701 - RNA, 18 nt, synthetic construct
  misc_feature 1..18: note = Targeting domain
  source 1..18: mol_type = other RNA
gtcctggtatcctctatg

SEQ ID NO: 702 - RNA, 19 nt, synthetic construct
  misc_feature 1..19: note = Targeting domain
  source 1..19: mol_type = other RNA
agtcctggtatcctctatg

SEQ ID NO: 703 - RNA, 20 nt, synthetic construct
  misc_feature 1..20: note = Targeting domain
  source 1..20: mol_type = other RNA
aagtcctggtatcctctatg

SEQ ID NO: 704 - RNA, 21 nt, synthetic construct
  misc_feature 1..21: note = Targeting domain
  source 1..21: mol_type = other RNA
gaagtcctggtatcctctatg

SEQ ID NO: 705 - RNA, 22 nt, synthetic construct
  misc_feature 1..22: note = Targeting domain
  source 1..22: mol_type = other RNA
agaagtcctggtatcctctatg

SEQ ID NO: 706 - RNA, 23 nt, synthetic construct
  misc_feature 1..23: note = Targeting domain
  source 1..23: mol_type = other RNA
aagaagtcctggtatcctctatg

SEQ ID NO: 707 - RNA, 24 nt, synthetic construct
  misc_feature 1..24: note = Targeting domain
  source 1..24: mol_type = other RNA
aaagaagtcctggtatcctctatg

SEQ ID NO: 708 - RNA, 18 nt, synthetic construct
  misc_feature 1..18: note = Targeting domain
  source 1..18: mol_type = other RNA
ctaaagggaagaataaat

SEQ ID NO: 709 - RNA, 19 nt, synthetic construct
  misc_feature 1..19: note = Targeting domain
  source 1..19: mol_type = other RNA
gctaaagggaagaataaat

SEQ ID NO: 710 - RNA, 20 nt, synthetic construct
  misc_feature 1..20: note = Targeting domain
  source 1..20: mol_type = other RNA
agctaaagggaagaataaat

SEQ ID NO: 711 - RNA, 21 nt, synthetic construct
  misc_feature 1..21: note = Targeting domain
  source 1..21: mol_type = other RNA
tagctaaagggaagaataaat

SEQ ID NO: 712 - RNA, 22 nt, synthetic construct
  misc_feature 1..22: note = Targeting domain
  source 1..22: mol_type = other RNA
ctagctaaagggaagaataaat

SEQ ID NO: 713 - RNA, 23 nt, synthetic construct
  misc_feature 1..23: note = Targeting domain
  source 1..23: mol_type = other RNA
actagctaaagggaagaataaat

SEQ ID NO: 714 - RNA, 24 nt, synthetic construct
  misc_feature 1..24: note = Targeting domain
  source 1..24: mol_type = other RNA
aactagctaaagggaagaataaat

SEQ ID NO: 715 - RNA, 18 nt, synthetic construct
  misc_feature 1..18: note = Targeting domain
  source 1..18: mol_type = other RNA
aaactggaatgactgaat

SEQ ID NO: 716 - RNA, 19 nt, synthetic construct
  misc_feature 1..19: note = Targeting domain
  source 1..19: mol_type = other RNA
aaaactggaatgactgaat

SEQ ID NO: 717 - RNA, 21 nt, synthetic construct
  misc_feature 1..21: note = Targeting domain
  source 1..21: mol_type = other RNA
gaaaaactggaatgactgaat

SEQ ID NO: 718 - RNA, 22 nt, synthetic construct
  misc_feature 1..22: note = Targeting domain
  source 1..22: mol_type = other RNA
agaaaaactggaatgactgaat

SEQ ID NO: 719 - RNA, 23 nt, synthetic construct
  misc_feature 1..23: note = Targeting domain
  source 1..23: mol_type = other RNA
gagaaaaactggaatgactgaat

SEQ ID NO: 720 - RNA, 24 nt, synthetic construct
  misc_feature 1..24: note = Targeting domain
  source 1..24: mol_type = other RNA
agagaaaaactggaatgactgaat

SEQ ID NO: 721 - RNA, 18 nt, synthetic construct
  misc_feature 1..18: note = Targeting domain
  source 1..18: mol_type = other RNA
cctggtatcctctatgat

SEQ ID NO: 722 - RNA, 19 nt, synthetic construct
  misc_feature 1..19: note = Targeting domain
  source 1..19: mol_type = other RNA
tcctggtatcctctatgat

SEQ ID NO: 723 - RNA, 21 nt, synthetic construct
  misc_feature 1..21: note = Targeting domain
  source 1..21: mol_type = other RNA
agtcctggtatcctctatgat

SEQ ID NO: 724 - RNA, 22 nt, synthetic construct
  misc_feature 1..22: note = Targeting domain
  source 1..22: mol_type = other RNA
aagtcctggtatcctctatgat

SEQ ID NO: 725 - RNA, 23 nt, synthetic construct
  misc_feature 1..23: note = Targeting domain
  source 1..23: mol_type = other RNA
gaagtcctggtatcctctatgat

SEQ ID NO: 726 - RNA, 24 nt, synthetic construct
  misc_feature 1..24: note = Targeting domain
  source 1..24: mol_type = other RNA
agaagtcctggtatcctctatgat

SEQ ID NO: 727 - RNA, 18 nt, synthetic construct
  misc_feature 1..18: note = Targeting domain
  source 1..18: mol_type = other RNA
aaattagcagtatcctct

SEQ ID NO: 728 - RNA, 19 nt, synthetic construct
  misc_feature 1..19: note = Targeting domain
  source 1..19: mol_type = other RNA
aaaattagcagtatcctct

SEQ ID NO: 729 - RNA, 21 nt, synthetic construct
  misc_feature 1..21: note = Targeting domain
  source 1..21: mol_type = other RNA
aaaaaattagcagtatcctct

SEQ ID NO: 730 - RNA, 22 nt, synthetic construct
  misc_feature 1..22: note = Targeting domain
  source 1..22: mol_type = other RNA
aaaaaaattagcagtatcctct

SEQ ID NO: 731 - RNA, 23 nt, synthetic construct
  misc_feature 1..23: note = Targeting domain
  source 1..23: mol_type = other RNA
aaaaaaaattagcagtatcctct

SEQ ID NO: 732 - RNA, 24 nt, synthetic construct
  misc_feature 1..24: note = Targeting domain
  source 1..24: mol_type = other RNA
taaaaaaaattagcagtatcctct

SEQ ID NO: 733 - RNA, 18 nt, synthetic construct
  misc_feature 1..18: note = Targeting domain
  source 1..18: mol_type = other RNA
cactcgcttctggaacgt

SEQ ID NO: 734 - RNA, 19 nt, synthetic construct
  misc_feature 1..19: note = Targeting domain
  source 1..19: mol_type = other RNA
acactcgcttctggaacgt

SEQ ID NO: 735 - RNA, 20 nt, synthetic construct
  misc_feature 1..20: note = Targeting domain
  source 1..20: mol_type = other RNA
cacactcgcttctggaacgt

SEQ ID NO: 736 - RNA, 21 nt, synthetic construct
  misc_feature 1..21: note = Targeting domain
  source 1..21: mol_type = other RNA
acacactcgcttctggaacgt

SEQ ID NO: 737 - RNA, 22 nt, synthetic construct
  misc_feature 1..22: note = Targeting domain
  source 1..22: mol_type = other RNA
cacacactcgcttctggaacgt

SEQ ID NO: 738 - RNA, 23 nt, synthetic construct
  misc_feature 1..23: note = Targeting domain
  source 1..23: mol_type = other RNA
ccacacactcgcttctggaacgt

SEQ ID NO: 739 - RNA, 24 nt, synthetic construct
  misc_feature 1..24: note = Targeting domain
  source 1..24: mol_type = other RNA
tccacacactcgcttctggaacgt

SEQ ID NO: 740 - RNA, 18 nt, synthetic construct
  misc_feature 1..18: note = Targeting domain
  source 1..18: mol_type = other RNA
ctcaatgcaaatatctgt

SEQ ID NO: 741 - RNA, 19 nt, synthetic construct
  misc_feature 1..19: note = Targeting domain
  source 1..19: mol_type = other RNA
tctcaatgcaaatatctgt

SEQ ID NO: 742 - RNA, 20 nt, synthetic construct
  misc_feature 1..20: note = Targeting domain
  source 1..20: mol_type = other RNA
atctcaatgcaaatatctgt

SEQ ID NO: 743 - RNA, 21 nt, synthetic construct
  misc_feature 1..21: note = Targeting domain
  source 1..21: mol_type = other RNA
tatctcaatgcaaatatctgt

SEQ ID NO: 744 - RNA, 22 nt, synthetic construct
  misc_feature 1..22: note = Targeting domain
  source 1..22: mol_type = other RNA
ctatctcaatgcaaatatctgt

SEQ ID NO: 745 - RNA, 23 nt, synthetic construct
  misc_feature 1..23: note = Targeting domain
  source 1..23: mol_type = other RNA
actatctcaatgcaaatatctgt

SEQ ID NO: 746 - RNA, 24 nt, synthetic construct
  misc_feature 1..24: note = Targeting domain
  source 1..24: mol_type = other RNA
cactatctcaatgcaaatatctgt

SEQ ID NO: 747 - RNA, 18 nt, synthetic construct
  misc_feature 1..18: note = Targeting domain
  source 1..18: mol_type = other RNA
agttccacacactcgctt

SEQ ID NO: 748 - RNA, 19 nt, synthetic construct
  misc_feature 1..19: note = Targeting domain
  source 1..19: mol_type = other RNA
cagttccacacactcgctt

SEQ ID NO: 749 - RNA, 20 nt, synthetic construct
  misc_feature 1..20: note = Targeting domain
  source 1..20: mol_type = other RNA
gcagttccacacactcgctt

SEQ ID NO: 750 - RNA, 21 nt, synthetic construct
  misc_feature 1..21: note = Targeting domain
  source 1..21: mol_type = other RNA
agcagttccacacactcgctt

SEQ ID NO: 751 - RNA, 22 nt, synthetic construct
  misc_feature 1..22: note = Targeting domain
  source 1..22: mol_type = other RNA
cagcagttccacacactcgctt

SEQ ID NO: 752 - RNA, 23 nt, synthetic construct
  misc_feature 1..23: note = Targeting domain
  source 1..23: mol_type = other RNA
tcagcagttccacacactcgctt

SEQ ID NO: 753 - RNA, 24 nt, synthetic construct
  misc_feature 1..24: note = Targeting domain
  source 1..24: mol_type = other RNA
ttcagcagttccacacactcgctt

SEQ ID NO: 754 - RNA, 18 nt, synthetic construct
  misc_feature 1..18: note = Targeting domain
  source 1..18: mol_type = other RNA
aattagcagtatcctctt

SEQ ID NO: 755 - RNA, 19 nt, synthetic construct
  misc_feature 1..19: note = Targeting domain
  source 1..19: mol_type = other RNA
aaattagcagtatcctctt

SEQ ID NO: 756 - RNA, 21 nt, synthetic construct
  misc_feature 1..21: note = Targeting domain
  source 1..21: mol_type = other RNA
aaaaattagcagtatcctctt

SEQ ID NO: 757 - RNA, 22 nt, synthetic construct
  misc_feature 1..22: note = Targeting domain
  source 1..22: mol_type = other RNA
aaaaaattagcagtatcctctt

SEQ ID NO: 758 - RNA, 23 nt, synthetic construct
  misc_feature 1..23: note = Targeting domain
  source 1..23: mol_type = other RNA
aaaaaaattagcagtatcctctt

SEQ ID NO: 759 - RNA, 24 nt, synthetic construct
  misc_feature 1..24: note = Targeting domain
  source 1..24: mol_type = other RNA
aaaaaaaattagcagtatcctctt

SEQ ID NO: 760 - RNA, 17 nt, synthetic construct
  misc_feature 1..17: note = Targeting domain
  source 1..17: mol_type = other RNA
gaagaaaactagctaaa

SEQ ID NO: 761 - RNA, 17 nt, synthetic construct
  misc_feature 1..17: note = Targeting domain
  source 1..17: mol_type = other RNA
gcagcagtatcctcttg

SEQ ID NO: 762 - RNA, 20 nt, synthetic construct
  misc_feature 1..20: note = Targeting domain
  source 1..20: mol_type = other RNA
ggagaagaaaactagctaaa

SEQ ID NO: 763 - RNA, 20 nt, synthetic construct
  misc_feature 1..20: note = Targeting domain
  source 1..20: mol_type = other RNA
gggagaagaaaactagctaa

SEQ ID NO: 764 - RNA, 20 nt, synthetic construct
  misc_feature 1..20: note = Targeting domain
  source 1..20: mol_type = other RNA
gtcctggtatcttctatggt

SEQ ID NO: 765 - RNA, 17 nt, synthetic construct
  misc_feature 1..17: note = Targeting domain
  source 1..17: mol_type = other RNA
agaagaaaactagctaa

SEQ ID NO: 766 - RNA, 17 nt, synthetic construct
  misc_feature 1..17: note = Targeting domain
  source 1..17: mol_type = other RNA
agtcctggtatcttcta

SEQ ID NO: 767 - RNA, 17 nt, synthetic construct
  misc_feature 1..17: note = Targeting domain
  source 1..17: mol_type = other RNA
ccaccatagaagatacc

SEQ ID NO: 768 - RNA, 17 nt, synthetic construct
  misc_feature 1..17: note = Targeting domain
  source 1..17: mol_type = other RNA
cctggtatcttctatgg

SEQ ID NO: 769 - RNA, 17 nt, synthetic construct
  misc_feature 1..17: note = Targeting domain
  source 1..17: mol_type = other RNA
cagcagtatcctcttgg

SEQ ID NO: 770 - RNA, 17 nt, synthetic construct
  misc_feature 1..17: note = Targeting domain
  source 1..17: mol_type = other RNA
aattggaatgactgaat

SEQ ID NO: 771 - RNA, 17 nt, synthetic construct
  misc_feature 1..17: note = Targeting domain
  source 1..17: mol_type = other RNA
ctggtatcttctatggt

SEQ ID NO: 772 - RNA, 17 nt, synthetic construct
  misc_feature 1..17: note = Targeting domain
  source 1..17: mol_type = other RNA
agcagcagtatcctctt

SEQ ID NO: 773 - RNA, 20 nt, synthetic construct
  misc_feature 1..20: note = Targeting domain
  source 1..20: mol_type = other RNA
agaagtcctggtatcttcta

SEQ ID NO: 774 - RNA, 20 nt, synthetic construct
  misc_feature 1..20: note = Targeting domain
  source 1..20: mol_type = other RNA
ctcccaccatagaagatacc

SEQ ID NO: 775 - RNA, 20 nt, synthetic construct
  misc_feature 1..20: note = Targeting domain
  source 1..20: mol_type = other RNA
agtcctggtatcttctatgg

SEQ ID NO: 776 - RNA, 20 nt, synthetic construct
  misc_feature 1..20: note = Targeting domain
  source 1..20: mol_type = other RNA
aagcagcagtatcctcttgg

SEQ ID NO: 777 - RNA, 20 nt, synthetic construct
  misc_feature 1..20: note = Targeting domain
  source 1..20: mol_type = other RNA
taagcagcagtatcctcttg

SEQ ID NO: 778 - RNA, 20 nt, synthetic construct
  misc_feature 1..20: note = Targeting domain
  source 1..20: mol_type = other RNA
agaataaattagagaaaaat

SEQ ID NO: 779 - RNA, 20 nt, synthetic construct
  misc_feature 1..20: note = Targeting domain
  source 1..20: mol_type = other RNA
aaaaattggaatgactgaat

SEQ ID NO: 780 - RNA, 20 nt, synthetic construct
  misc_feature 1..20: note = Targeting domain
  source 1..20: mol_type = other RNA
attaagcagcagtatcctct

SEQ ID NO: 781 - RNA, 20 nt, synthetic construct
  misc_feature 1..20: note = Targeting domain
  source 1..20: mol_type = other RNA
ttaagcagcagtatcctctt

SEQ ID NO: 782 - RNA, 17 nt, synthetic construct
  misc_feature 1..17: note = Targeting domain
  source 1..17: mol_type = other RNA
ataaattagagaaaaat

SEQ ID NO: 783 - RNA, 17 nt, synthetic construct
  misc_feature 1..17: note = Targeting domain
  source 1..17: mol_type = other RNA
aagcagcagtatcctct

SEQ ID NO: 784 - RNA, 20 nt, synthetic construct
  misc_feature 1..20: note = Targeting domain
  source 1..20: mol_type = other RNA
gaagaaaactagctaaaggg

SEQ ID NO: 785 - RNA, 22 nt, synthetic construct
  misc_feature 1..22: note = Targeting domain
  source 1..22: mol_type = other RNA
gagaagaaaactagctaaaggg

SEQ ID NO: 786 - RNA, 23 nt, synthetic construct
  misc_feature 1..23: note = Targeting domain
  source 1..23: mol_type = other RNA
ggagaagaaaactagctaaaggg

SEQ ID NO: 787 - RNA, 24 nt, synthetic construct
  misc_feature 1..24: note = Targeting domain
  source 1..24: mol_type = other RNA
gggagaagaaaactagctaaaggg

SEQ ID NO: 788 - RNA, 19 nt, synthetic construct
  misc_feature 1..19: note = Targeting domain
  source 1..19: mol_type = other RNA
gaataaattagagaaaaat

SEQ ID NO: 789 - RNA, 22 nt, synthetic construct
  misc_feature 1..22: note = Targeting domain
  source 1..22: mol_type = other RNA
gaagaataaattagagaaaaat

SEQ ID NO: 790 - RNA, 23 nt, synthetic construct
  misc_feature 1..23: note = Targeting domain
  source 1..23: mol_type = other RNA
ggaagaataaattagagaaaaat

SEQ ID NO: 791 - RNA, 24 nt, synthetic construct
  misc_feature 1..24: note = Targeting domain
  source 1..24: mol_type = other RNA
gggaagaataaattagagaaaaat

SEQ ID NO: 792 - RNA, 18 nt, synthetic construct
  misc_feature 1..18: note = Targeting domain
  source 1..18: mol_type = other RNA
agagaaaaattggaatga

SEQ ID NO: 793 - RNA, 19 nt, synthetic construct
  misc_feature 1..19: note = Targeting domain
  source 1..19: mol_type = other RNA
tagagaaaaattggaatga

SEQ ID NO: 794 - RNA, 20 nt, synthetic construct
  misc_feature 1..20: note = Targeting domain
  source 1..20: mol_type = other RNA
ttagagaaaaattggaatga

SEQ ID NO: 795 - RNA, 21 nt, synthetic construct
  misc_feature 1..21: note = Targeting domain
  source 1..21: mol_type = other RNA
attagagaaaaattggaatga

SEQ ID NO: 796 - RNA, 22 nt, synthetic construct
  misc_feature 1..22: note = Targeting domain
  source 1..22: mol_type = other RNA
aattagagaaaaattggaatga

SEQ ID NO: 797 - RNA, 23 nt, synthetic construct
  misc_feature 1..23: note = Targeting domain
  source 1..23: mol_type = other RNA
aaattagagaaaaattggaatga

SEQ ID NO: 798 - RNA, 24 nt, synthetic construct
  misc_feature 1..24: note = Targeting domain
  source 1..24: mol_type = other RNA
taaattagagaaaaattggaatga

SEQ ID NO: 799 - RNA, 18 nt, synthetic construct
  misc_feature 1..18: note = Targeting domain
  source 1..18: mol_type = other RNA
agaaaactagctaaaggg

SEQ ID NO: 800 - RNA, 19 nt, synthetic construct
  misc_feature 1..19: note = Targeting domain
  source 1..19: mol_type = other RNA
aagaaaactagctaaaggg

SEQ ID NO: 801 - RNA, 21 nt, synthetic construct
  misc_feature 1..21: note = Targeting domain
  source 1..21: mol_type = other RNA
agaagaaaactagctaaaggg

SEQ ID NO: 802 - RNA, 18 nt, synthetic construct
  misc_feature 1..18: note = Targeting domain
  source 1..18: mol_type = other RNA
aataaattagagaaaaat

SEQ ID NO: 803 - RNA, 21 nt, synthetic construct
  misc_feature 1..21: note = Targeting domain
  source 1..21: mol_type = other RNA
aagaataaattagagaaaaat

SEQ ID NO: 804 - RNA, 18 nt, synthetic construct
  misc_feature 1..18: note = Targeting domain
  source 1..18: mol_type = other RNA
agttttcttctcccacca

SEQ ID NO: 805 - RNA, 19 nt, synthetic construct
  misc_feature 1..19: note = Targeting domain
  source 1..19: mol_type = other RNA
tagttttcttctcccacca

SEQ ID NO: 806 - RNA, 20 nt, synthetic construct
  misc_feature 1..20: note = Targeting domain
  source 1..20: mol_type = other RNA
ctagttttcttctcccacca

SEQ ID NO: 807 - RNA, 21 nt, synthetic construct
  misc_feature 1..21: note = Targeting domain
  source 1..21: mol_type = other RNA
gctagttttcttctcccacca

SEQ ID NO: 808 - RNA, 22 nt, synthetic construct
  misc_feature 1..22: note = Targeting domain
  source 1..22: mol_type = other RNA
agctagttttcttctcccacca

SEQ ID NO: 809 - RNA, 23 nt, synthetic construct
  misc_feature 1..23: note = Targeting domain
  source 1..23: mol_type = other RNA
tagctagttttcttctcccacca

SEQ ID NO: 810 - RNA, 24 nt, synthetic construct
  misc_feature 1..24: note = Targeting domain
  source 1..24: mol_type = other RNA
ttagctagttttcttctcccacca

SEQ ID NO: 811 - RNA, 18 nt, synthetic construct
  misc_feature 1..18: note = Targeting domain
  source 1..18: mol_type = other RNA
tcccaccatagaagatac

SEQ ID NO: 812 - RNA, 19 nt, synthetic construct
  misc_feature 1..19: note = Targeting domain
  source 1..19: mol_type = other RNA
ctcccaccatagaagatac

SEQ ID NO: 813 - RNA, 20 nt, synthetic construct
  misc_feature 1..20: note = Targeting domain
  source 1..20: mol_type = other RNA
tctcccaccatagaagatac

SEQ ID NO: 814 - RNA, 21 nt, synthetic construct
  misc_feature 1..21: note = Targeting domain
  source 1..21: mol_type = other RNA
ttctcccaccatagaagatac

SEQ ID NO: 815 - RNA, 22 nt, synthetic construct
  misc_feature 1..22: note = Targeting domain
  source 1..22: mol_type = other RNA
cttctcccaccatagaagatac

SEQ ID NO: 816 - RNA, 23 nt, synthetic construct
  misc_feature 1..23: note = Targeting domain
  source 1..23: mol_type = other RNA
tcttctcccaccatagaagatac

SEQ ID NO: 817 - RNA, 24 nt, synthetic construct
  misc_feature 1..24: note = Targeting domain
  source 1..24: mol_type = other RNA
ttcttctcccaccatagaagatac

SEQ ID NO: 818 - RNA, 18 nt, synthetic construct
  misc_feature 1..18: note = Targeting domain
  source 1..18: mol_type = other RNA
agaagaaaactagctaaa

SEQ ID NO: 819 - RNA, 19 nt, synthetic construct
  misc_feature 1..19: note = Targeting domain
  source 1..19: mol_type = other RNA
gagaagaaaactagctaaa

SEQ ID NO: 820 - RNA, 21 nt, synthetic construct
  misc_feature 1..21: note = Targeting domain
  source 1..21: mol_type = other RNA
gggagaagaaaactagctaaa

SEQ ID NO: 821 - RNA, 22 nt, synthetic construct
  misc_feature 1..22: note = Targeting domain
  source 1..22: mol_type = other RNA
tgggagaagaaaactagctaaa

SEQ ID NO: 822 - RNA, 23 nt, synthetic construct
  misc_feature 1..23: note = Targeting domain
  source 1..23: mol_type = other RNA
gtgggagaagaaaactagctaaa

SEQ ID NO: 823 - RNA, 24 nt, synthetic construct
  misc_feature 1..24: note = Targeting domain
  source 1..24: mol_type = other RNA
ggtgggagaagaaaactagctaaa

SEQ ID NO: 824 - RNA, 18 nt, synthetic construct
  misc_feature 1..18: note = Targeting domain
  source 1..18: mol_type = other RNA
aaaattggaatgactgaa

SEQ ID NO: 825 - RNA, 19 nt, synthetic construct
  misc_feature 1..19: note = Targeting domain
  source 1..19: mol_type = other RNA
aaaaattggaatgactgaa

SEQ ID NO: 826 - RNA, 20 nt, synthetic construct
  misc_feature 1..20: note = Targeting domain
  source 1..20: mol_type = other RNA
gaaaaattggaatgactgaa

SEQ ID NO: 827 - RNA, 21 nt, synthetic construct
  misc_feature 1..21: note = Targeting domain
  source 1..21: mol_type = other RNA
agaaaaattggaatgactgaa

SEQ ID NO: 828 - RNA, 22 nt, synthetic construct
  misc_feature 1..22: note = Targeting domain
  source 1..22: mol_type = other RNA
gagaaaaattggaatgactgaa

SEQ ID NO: 829 - RNA, 23 nt, synthetic construct
  misc_feature 1..23: note = Targeting domain
  source 1..23: mol_type = other RNA
agagaaaaattggaatgactgaa

SEQ ID NO: 830 - RNA, 24 nt, synthetic construct
  misc_feature 1..24: note = Targeting domain
  source 1..24: mol_type = other RNA
tagagaaaaattggaatgactgaa

SEQ ID NO: 831 - RNA, 18 nt, synthetic construct
  misc_feature 1..18: note = Targeting domain
  source 1..18: mol_type = other RNA
gagaagaaaactagctaa

SEQ ID NO: 832 - RNA, 19 nt, synthetic construct
  misc_feature 1..19: note = Targeting domain
  source 1..19: mol_type = other RNA
ggagaagaaaactagctaa

SEQ ID NO: 833 - RNA, 21 nt, synthetic construct
  misc_feature 1..21: note = Targeting domain
  source 1..21: mol_type = other RNA
tgggagaagaaaactagctaa

SEQ ID NO: 834 - RNA, 22 nt, synthetic construct
  misc_feature 1..22: note = Targeting domain
  source 1..22: mol_type = other RNA
gtgggagaagaaaactagctaa

SEQ ID NO: 835 - RNA, 23 nt, synthetic construct
  misc_feature 1..23: note = Targeting domain
  source 1..23: mol_type = other RNA
ggtgggagaagaaaactagctaa

SEQ ID NO: 836 - RNA, 24 nt, synthetic construct
  misc_feature 1..24: note = Targeting domain
  source 1..24: mol_type = other RNA
tggtgggagaagaaaactagctaa

SEQ ID NO: 837 - RNA, 18 nt, synthetic construct
  misc_feature 1..18: note = Targeting domain
  source 1..18: mol_type = other RNA
ggagaagaaaactagcta

SEQ ID NO: 838 - RNA, 19 nt, synthetic construct
  misc_feature 1..19: note = Targeting domain
  source 1..19: mol_type = other RNA
gggagaagaaaactagcta

SEQ ID NO: 839 - RNA, 20 nt, synthetic construct
  misc_feature 1..20: note = Targeting domain
  source 1..20: mol_type = other RNA
tgggagaagaaaactagcta

SEQ ID NO: 840 - RNA, 21 nt, synthetic construct
  misc_feature 1..21: note = Targeting domain
  source 1..21: mol_type = other RNA
gtgggagaagaaaactagcta

SEQ ID NO: 841 - RNA, 22 nt, synthetic construct
  misc_feature 1..22: note = Targeting domain
  source 1..22: mol_type = other RNA
ggtgggagaagaaaactagcta

SEQ ID NO: 842 - RNA, 23 nt, synthetic construct
  misc_feature 1..23: note = Targeting domain
  source 1..23: mol_type = other RNA
tggtgggagaagaaaactagcta

SEQ ID NO: 843 - RNA, 24 nt, synthetic construct
  misc_feature 1..24: note = Targeting domain
  source 1..24: mol_type = other RNA
atggtgggagaagaaaactagcta

SEQ ID NO: 844 - RNA, 18 nt, synthetic construct
  misc_feature 1..18: note = Targeting domain
  source 1..18: mol_type = other RNA
ttaagcagcagtatcctc

SEQ ID NO: 845 - RNA, 19 nt, synthetic construct
  misc_feature 1..19: note = Targeting domain
  source 1..19: mol_type = other RNA
attaagcagcagtatcctc

SEQ ID NO: 846 - RNA, 20 nt, synthetic construct
  misc_feature 1..20: note = Targeting domain
  source 1..20: mol_type = other RNA
aattaagcagcagtatcctc

SEQ ID NO: 847 - RNA, 21 nt, synthetic construct
  misc_feature 1..21: note = Targeting domain
  source 1..21: mol_type = other RNA
aaattaagcagcagtatcctc

SEQ ID NO: 848 - RNA, 22 nt, synthetic construct
  misc_feature 1..22: note = Targeting domain
  source 1..22: mol_type = other RNA
aaaattaagcagcagtatcctc

SEQ ID NO: 849 - RNA, 23 nt, synthetic construct
  misc_feature 1..23: note = Targeting domain
  source 1..23: mol_type = other RNA
aaaaattaagcagcagtatcctc

SEQ ID NO: 850 - RNA, 24 nt, synthetic construct
  misc_feature 1..24: note = Targeting domain
  source 1..24: mol_type = other RNA
aaaaaattaagcagcagtatcctc

SEQ ID NO: 851 - RNA, 18 nt, synthetic construct
  misc_feature 1..18: note = Targeting domain
  source 1..18: mol_type = other RNA
tatcttctatggtgggag

SEQ ID NO: 852 - RNA, 19 nt, synthetic construct
  misc_feature 1..19: note = Targeting domain
  source 1..19: mol_type = other RNA
gtatcttctatggtgggag

SEQ ID NO: 853 - RNA, 20 nt, synthetic construct
  misc_feature 1..20: note = Targeting domain
  source 1..20: mol_type = other RNA
ggtatcttctatggtgggag

SEQ ID NO: 854 - RNA, 21 nt, synthetic construct
  misc_feature 1..21: note = Targeting domain
  source 1..21: mol_type = other RNA
tggtatcttctatggtgggag

SEQ ID NO: 855 - RNA, 22 nt, synthetic construct
  misc_feature 1..22: note = Targeting domain
  source 1..22: mol_type = other RNA
ctggtatcttctatggtgggag

SEQ ID NO: 856 - RNA, 23 nt, synthetic construct
  misc_feature 1..23: note = Targeting domain
  source 1..23: mol_type = other RNA
cctggtatcttctatggtgggag

SEQ ID NO: 857 - RNA, 24 nt, synthetic construct
  misc_feature 1..24: note = Targeting domain
  source 1..24: mol_type = other RNA
tcctggtatcttctatggtgggag

SEQ ID NO: 858 - RNA, 18 nt, synthetic construct
  misc_feature 1..18: note = Targeting domain
  source 1..18: mol_type = other RNA
tcctggtatcttctatgg

SEQ ID NO: 859 - RNA, 19 nt, synthetic construct
  misc_feature 1..19: note = Targeting domain
  source 1..19: mol_type = other RNA
gtcctggtatcttctatgg

SEQ ID NO: 860 - RNA, 21 nt, synthetic construct
  misc_feature 1..21: note = Targeting domain
  source 1..21: mol_type = other RNA
aagtcctggtatcttctatgg

SEQ ID NO: 861 - RNA, 22 nt, synthetic construct
  misc_feature 1..22: note = Targeting domain
  source 1..22: mol_type = other RNA
gaagtcctggtatcttctatgg

SEQ ID NO: 862 - RNA, 23 nt, synthetic construct
  misc_feature 1..23: note = Targeting domain
  source 1..23: mol_type = other RNA
agaagtcctggtatcttctatgg

SEQ ID NO: 863 - RNA, 24 nt, synthetic construct
  misc_feature 1..24: note = Targeting domain
  source 1..24: mol_type = other RNA
aagaagtcctggtatcttctatgg

SEQ ID NO: 864 - RNA, 18 nt, synthetic construct
  misc_feature 1..18: note = Targeting domain
  source 1..18: mol_type = other RNA
tggtatcttctatggtgg

SEQ ID NO: 865 - RNA, 19 nt, synthetic construct
  misc_feature 1..19: note = Targeting domain
  source 1..19: mol_type = other RNA
ctggtatcttctatggtgg

SEQ ID NO: 866 - RNA, 20 nt, synthetic construct
  misc_feature 1..20: note = Targeting domain
  source 1..20: mol_type = other RNA
cctggtatcttctatggtgg

SEQ ID NO: 867 - RNA, 21 nt, synthetic construct
  misc_feature 1..21: note = Targeting domain
  source 1..21: mol_type = other RNA
tcctggtatcttctatggtgg

SEQ ID NO: 868 - RNA, 22 nt, synthetic construct
  misc_feature 1..22: note = Targeting domain
  source 1..22: mol_type = other RNA
gtcctggtatcttctatggtgg

SEQ ID NO: 869 - RNA, 23 nt, synthetic construct
  misc_feature 1..23: note = Targeting domain
  source 1..23: mol_type = other RNA
agtcctggtatcttctatggtgg

SEQ ID NO: 870 - RNA, 24 nt, synthetic construct
  misc_feature 1..24: note = Targeting domain
  source 1..24: mol_type = other RNA
aagtcctggtatcttctatggtgg

SEQ ID NO: 871 - RNA, 18 nt, synthetic construct
  misc_feature 1..18: note = Targeting domain
  source 1..18: mol_type = other RNA
gtcctggtatcttctatg

SEQ ID NO: 872 - RNA, 19 nt, synthetic construct
  misc_feature 1..19: note = Targeting domain
  source 1..19: mol_type = other RNA
agtcctggtatcttctatg

SEQ ID NO: 873 - RNA, 20 nt, synthetic construct
  misc_feature 1..20: note = Targeting domain
  source 1..20: mol_type = other RNA
aagtcctggtatcttctatg

SEQ ID NO: 874 - RNA, 21 nt, synthetic construct
  misc_feature 1..21: note = Targeting domain
  source 1..21: mol_type = other RNA
gaagtcctggtatcttctatg

SEQ ID NO: 875 - RNA, 22 nt, synthetic construct
  misc_feature 1..22: note = Targeting domain
  source 1..22: mol_type = other RNA
agaagtcctggtatcttctatg

SEQ ID NO: 876 - RNA, 23 nt, synthetic construct
  misc_feature 1..23: note = Targeting domain
  source 1..23: mol_type = other RNA
aagaagtcctggtatcttctatg

SEQ ID NO: 877 - RNA, 24 nt, synthetic construct
  misc_feature 1..24: note = Targeting domain
  source 1..24: mol_type = other RNA
aaagaagtcctggtatcttctatg

SEQ ID NO: 878 - RNA, 18 nt, synthetic construct
  misc_feature 1..18: note = Targeting domain
  source 1..18: mol_type = other RNA
aaattggaatgactgaat

SEQ ID NO: 879 - RNA, 19 nt, synthetic construct
  misc_feature 1..19: note = Targeting domain
  source 1..19: mol_type = other RNA
aaaattggaatgactgaat

SEQ ID NO: 880 - RNA, 21 nt, synthetic construct
  misc_feature 1..21: note = Targeting domain
  source 1..21: mol_type = other RNA
gaaaaattggaatgactgaat

SEQ ID NO: 881 - RNA, 22 nt, synthetic construct
  misc_feature 1..22: note = Targeting domain
  source 1..22: mol_type = other RNA
agaaaaattggaatgactgaat

SEQ ID NO: 882 - RNA, 23 nt, synthetic construct
  misc_feature 1..23: note = Targeting domain
  source 1..23: mol_type = other RNA
gagaaaaattggaatgactgaat

SEQ ID NO: 883 - RNA, 24 nt, synthetic construct
  misc_feature 1..24: note = Targeting domain
  source 1..24: mol_type = other RNA
agagaaaaattggaatgactgaat

SEQ ID NO: 884 - RNA, 18 nt, synthetic construct
  misc_feature 1..18: note = Targeting domain
  source 1..18: mol_type = other RNA
taagcagcagtatcctct

SEQ ID NO: 885 - RNA, 19 nt, synthetic construct
  misc_feature 1..19: note = Targeting domain
  source 1..19: mol_type = other RNA
ttaagcagcagtatcctct

SEQ ID NO: 886 - RNA, 21 nt, synthetic construct
  misc_feature 1..21: note = Targeting domain
  source 1..21: mol_type = other RNA
aattaagcagcagtatcctct

SEQ ID NO: 887 - RNA, 22 nt, synthetic construct
  misc_feature 1..22: note = Targeting domain
  source 1..22: mol_type = other RNA
aaattaagcagcagtatcctct

SEQ ID NO: 888 - RNA, 23 nt, synthetic construct
  misc_feature 1..23: note = Targeting domain
  source 1..23: mol_type = other RNA
aaaattaagcagcagtatcctct

SEQ ID NO: 889 - RNA, 24 nt, synthetic construct
  misc_feature 1..24: note = Targeting domain
  source 1..24: mol_type = other RNA
aaaaattaagcagcagtatcctct

SEQ ID NO: 890 - RNA, 18 nt, synthetic construct
  misc_feature 1..18: note = Targeting domain
  source 1..18: mol_type = other RNA
cctggtatcttctatggt

SEQ ID NO: 891 - RNA, 19 nt, synthetic construct
  misc_feature 1..19: note = Targeting domain
  source 1..19: mol_type = other RNA
tcctggtatcttctatggt

SEQ ID NO: 892 - RNA, 21 nt, synthetic construct
  misc_feature 1..21: note = Targeting domain
  source 1..21: mol_type = other RNA
agtcctggtatcttctatggt

SEQ ID NO: 893 - RNA, 22 nt, synthetic construct
  misc_feature 1..22: note = Targeting domain
  source 1..22: mol_type = other RNA
aagtcctggtatcttctatggt

SEQ ID NO: 894 - RNA, 23 nt, synthetic construct
  misc_feature 1..23: note = Targeting domain
  source 1..23: mol_type = other RNA
gaagtcctggtatcttctatggt

SEQ ID NO: 895 - RNA, 24 nt, synthetic construct
  misc_feature 1..24: note = Targeting domain
  source 1..24: mol_type = other RNA
agaagtcctggtatcttctatggt

SEQ ID NO: 896 - RNA, 18 nt, synthetic construct
  misc_feature 1..18: note = Targeting domain
  source 1..18: mol_type = other RNA
aagcagcagtatcctctt

SEQ ID NO: 897 - RNA, 19 nt, synthetic construct
  misc_feature 1..19: note = Targeting domain
  source 1..19: mol_type = other RNA
taagcagcagtatcctctt

SEQ ID NO: 898 - RNA, 21 nt, synthetic construct
  misc_feature 1..21: note = Targeting domain
  source 1..21: mol_type = other RNA
attaagcagcagtatcctctt

SEQ ID NO: 899 - RNA, 22 nt, synthetic construct
  misc_feature 1..22: note = Targeting domain
  source 1..22: mol_type = other RNA
aattaagcagcagtatcctctt

SEQ ID NO: 900 - RNA, 23 nt, synthetic construct
  misc_feature 1..23: note = Targeting domain
  source 1..23: mol_type = other RNA
aaattaagcagcagtatcctctt

SEQ ID NO: 901 - RNA, 24 nt, synthetic construct
  misc_feature 1..24: note = Targeting domain
  source 1..24: mol_type = other RNA
aaaattaagcagcagtatcctctt

SEQ ID NO: 902 - DNA, 4758 bp, Homo sapiens
  misc_feature 2716..2719: note = HPFH deletion site (4 bp del -225 to -222)
  misc_feature 2748..2753: note = GATA1 binding motif
  misc_feature 2762..2767: note = GATA1 binding motif
  misc_feature 2791..2799: note = FKLF transcription factor binding motif
  misc_feature 2823..2830: note = CP1/Coup TFII binding motif
  misc_feature 2824..2836: note = HPFH deletion site (13 bp del -114 to -102)
  misc_feature 2991..2993: note = Start codon
  source 1..4758: mol_type = other DNA
tttaggaagtcaaggtttaggcagggatagccattctattttattaggggcaatactatttccaacggcatctggcttttctcagcccttgtgaggctctacagggaggttgaggtgttagagatcagagcaggaaacaggtttttctttccacggtaactacaatgaagtgatccttactttactaaggaacttttcattttaagtgttgacgcatgcctaaagaggtgaaattaatcccatacccttaagtctacagactggtcacagcatttcaaggaggagacctcattgtaagcttctagggaggtggggacttaggtgaaggaaatgagccagcagaagctcacaagtcagcatcagcgtgtcatgtctcagcagcagaacagcacggtcagatgaaaatatagtgtgaagaatttgtataacattaattgagaaggcagattcactggagttcttatataattgaaagttaatgcacgttaataagcaagagtttagtttaatgtgatggtgttatgaacttaacgcttgtgtctccagaaaattcacatgctgaatccccaactcccaattggctccatttgtgggggaggctttggaaaagtaatcaggtttagaggagctcatgagagcagatccccatcatagaattattttcctcatcagaagcagagagattagccatttctcttccttctggtgaggacacagtgggaagtcagccacctgcaacccaggaagagagccctgaccaggaaccagcagaaaagtgagaaaaaatcctgttgttgaagtcacccagtctatgctattttgttatagcaccttgcactaagtaaggcagatgaagaaagagaaaaaaataagcttcggtgttcagtggattagaaaccatgtttatctcaggtttacaaatctccacttgtcctctgtgtttcagaataaaataccaactctactactctcatctgtaagatgcaaatagtaagcctgagcccttctgtctaactttgaattctattttttcttcaacgtactttaggcttgtaatgtgtttatatacagtgaaatgtcaagttctttctttatatttctttctttcttttttttcctcagcctcagagttttccacatgcccttcctactttcaggaacttctttctccaaacgtcttctgcctggctccatcaaatcataaaggacccacttcaaatgccatcactcactaccatttcacaattcgcactttctttctttgtcctttttttttttagtaaaacaagtttataaaaaattgaaggaataaatgaatggctacttcataggcagagtagacgcaagggctactggttgccgatttttattgttatttttcaatagtatgctaaacaaggggtagattatttatgctgcccatttttagaccataaaagataacttcctgatgttgccatggcatttttttccttttaattttatttcatttcattttaatttcgaaggtacatgtgcaggatgtgcaggcttgttacatgggtaaatgtgtgtctttctggccttttagccatctgtatcaatgagcagatataagctttacacaggatcatgaaggatgaaagaatttcaccaatattataataatttcaatcaacctgatagcttaggggataaactaatttgaagatacagcttgcctccgataagccagaattccagagcttctggcattataatctagcaaggttagagatcatggatcactttcagagaaaaacaaaaacaaactaaccaaaagcaaaacagaaccaaaaaaccaccataaatacttcctaccctgttaatggtccaatatgtcagaaacagcactgtgttagaaataaagctgtctaaagtacactaatattcgagttataatagtgtgtggactattagtcaataaaaacaacccttgcctctttagagttgttttccatgtacacgcacatcttatgtcttagagtaagattccctgagaagtgaacctagcatttatacaagataattaattctaatccacagtacctgccaaagaacattctaccatcatctttactgagcatagaagagctacgccaaaaccctgggtcatcagccagcacacacacttatccagtggtaaatacacatcatctggtgtatacatacatacctgaatatggaatcaaatatttttctaagatgaaacagtcatgatttatttcaaataggtacggataagtagatattgaggtaagcattaggtcttatattatgtaacactaatctattactgcgctgaaactgtggctttatagaaattgttttcactgcactattgagaaattaagagataatggcaaaagtcacaaagagtatattcaaaaagaagtatagcactttttccttagaaaccactgctaactgaaagagactaagatttgtcccgtcaaaaatcctggacctatgcctaaaacacatttcacaatccctgaacttttcaaaaattggtacatgctttagctttaaactacaggcctcactggagctagagacaagaaggtaaaaaacggctgacaaaagaagtcctggtatcctctatgatgggagaaggaaactagctaaagggaagaataaattagagaaaaactggaatgactgaatcggaacaaggcaaaggctataaaaaaaattagcagtatcctcttgggggccccttccccacactatctcaatgcaaatatctgtctgaaacggtccctggctaaactccacccatgggttggccagccttgccttgaccaatagccttgacaaggcaaacttgaccaatagtcttagagtatccagtgaggccaggggccggcggctggctagggatgaagaataaaaggaagcacccttcagcagttccacacactcgcttctggaacgtctgaggttatcaataagctcctagtccagacgccatgggtcatttcacagaggaggacaaggctactatcacaagcctgtggggcaaggtgaatgtggaagatgctggaggagaaaccctgggaaggtaggctctggtgaccaggacaagggagggaaggaaggaccctgtgcctggcaaaagtccaggtcgcttctcaggatttgtggcaccttctgactgtcaaactgttcttgtcaatctcacaggctcctggttgtctacccatggacccagaggttctttgacagctttggcaacctgtcctctgcctctgccatcatgggcaaccccaaagtcaaggcacatggcaagaaggtgctgacttccttgggagatgccacaaagcacctggatgatctcaagggcacctttgcccagctgagtgaactgcactgtgacaagctgcatgtggatcctgagaacttcaaggtgagtccaggagatgtttcagccctgttgcctttagtctcgaggcaacttagacaacggagtattgatctgagcacagcagggtgtgagctgtttgaagatactggggttgggggtgaagaaactgcagaggactaactgggctgagacccagtggtaatgttttagggcctaaggagtgcctctaaaaatctagatggacaattttgactttgagaaaagagaggtggaaatgaggaaaatgacttttctttattagattccagtagaaagaactttcatctttccctcatttttgttgttttaaaacatctatctggaggcaggacaagtatggtcgttaaaaagatgcaggcagaaggcatatattggctcagtcaaagtggggaactttggtggccaaacatacattgctaaggctattcctatatcagctggacacatataaaatgctgctaatgcttcattacaaacttatatcctttaattccagatgggggcaaagtatgtccaggggtgaggaacaattgaaacatttgggctggagtagattttgaaagtcagctctgtgtgtgtgtgtgtgtgtgcgcgcgcgcgtgtgtgtgtgtgtgtcagcgtgtgtttcttttaacgtcttcagcctacaacatacagggttcatggtggcaagaagatagcaagatttaaattatggccagtgactagtgcttgaaggggaacaactacctgcatttaatgggaaggcaaaatctcaggctttgagggaagttaacataggcttgattctgggtggaagcttggtgtgtagttatctggaggccaggctggagctctcagctcactatgggttcatctttattgtctcctttcatctcaacagctcctgggaaatgtgctggtgaccgttttggcaatccatttcggcaaagaattcacccctgaggtgcaggcttcctggcagaagatggtgactgcagtggccagtgccctgtcctccagataccactgagctcactgcccatgattcagagctttcaaggataggctttattctgcaagcaatacaaataataaatctattctgctgagagatcacacatgattttcttcagctcttttttttacatctttttaaatatatgagccacaaagggtttatattgagggaagtgtgtatgtgtatttctgcatgcctgtttgtgtttgtggtgtgtgcatgctcctcatttatttttatatgagatgtgcattttgatgagcaaataaaagcagtaaagacacttgtacacgggagttctgcaagtgggagtaaatggtgtaggagaaatccg

SEQ ID NO: 903 - DNA, 4773 bp, Homo sapiens
  misc_feature 1233..1238: note = GATA1 binding site
  misc_feature 2672..2677: note = GATA1 binding site
  misc_feature 2686..2691: note = GATA1 binding site
  misc_feature 2715..2723: note = FKLF transcription factor binding motif
  misc_feature 2747..2754: note = CP1/Coup TFII binding motif
  misc_feature 2748..2760: note = HPFH deletion site (13 bp del -114 to -102)
  misc_feature 2915..2917: note = Start codon
  source 1..4773: mol_type = other DNA
ttatgtcattaccagagttaaaattctataatggcttctcactccctaccactgaggacaagtttatgtccttaggtttatgcttccctgaaacaataccacctgctattctccactttacatatcaacggcactggttctttatctaactctctggcacagcaggagtttgttttcttctgcttcagagctttgaatttactatttcagcttctaaactttatttggcaatgccttcccatggcagattccttctgtcattttgcctctgttcgaatactttctccttaatttcattcttagttaataatatctgaaattattttgttgtttaacttaattattaattttatgtatgttctacctagattataatcttcagaggaaagttttattctctgacttatttaacttaaatgcccactactttaaaaattatgacatttatttaacagatatttgctgaacaaatgtttgaaaatacatgggaaagaatgcttgaaaacacttgaaattgcttgtgtaaagaaacagttttatcagttaggatttaatcaatgtcagaagcaatgatataggaaaaatcgaggaataagacagttatggataaggagaaatcaacaaactcttaaaagatattgcctcaaaagcataagaggaaataagggtttatacatgacttttagaacactgccttggtttttggataaatggggaagttgtttgaaaacaggagggatcctagatattccttagtctgaggaggagcaattaagattcacttgtttagaggctgggagtggtggctcacgcctgtaatcccagaattttgggaggccaaggcaggcagatcacctgaggtcaagagttcaagaccaacctggccaacatggtgaaatcccatctctacaaaaatacaaaaattagacaggcatgatggcaagtgcctgtaatcccagctacttgggaggctgaggaaggagaattgcttgaacctggaaggcaggagttgcagtgagccgagatcataccactgcactccagcctgggtgacagaacaagactctgtctcaaaaaaaaaaaagagagattcaaaagattcacttgtttaggccttagcgggcttagacaccagtctctgacacattcttaaaggtcaggctctacaaatggaacccaaccagactctcagatatggccaaagatctatacacacccatctcacagatcccctatcttaaagagaccctaatttgggttcacctcagtctctataatctgtaccagcataccaataaaaatctttctcacccatccttagattgagagaagtcacttattattatgtgagtaactggaagatactgataagttgacaaatctttttctttcctttcttattcaacttttattttaacttccaaagaacaagtgcaatatgtgcagctttgttgcgcaggtcaacatgtatctttctggtcttttagccgcctaacactttgagcagatataagccttacacaggattatgaagtctgaaaggattccaccaatattattataattcctatcaacctgataggttaggggaaggtagagctctcctccaataagccagatttccagagtttctgacgtcataatctaccaaggtcatggatcgagttcagagaaaaaacaaaagcaaaaccaaacctaccaaaaaataaaaatcccaaagaaaaaataaagaaaaaaacagcatgaatacttcctgccatgttaagtggccaatatgtcagaaacagcactgagttacagataaagatgtctaaactacagtgacatcccagctgtcacagtgtgtggactattagtcaataaaacagtccctgcctcttaagagttgttttccatgcaaatacatgtcttatgtcttagaataagattccctaagaagtgaacctagcatttatacaagataattaattctaatccatagtatctggtaaagagcattctaccatcatctttaccgagcatagaagagctacaccaaaaccctgggtcatcagccagcacatacacttatccagtgataaatacacatcatcgggtgcctacatacatacctgaatataaaaaaaatacttttgctgagatgaaacaggcgtgatttatttcaaataggtacggataagtagatattgaagtaaggattcagtcttatattatattacataacattaatctattcctgcactgaaactgttgctttataggatttttcactacactaatgagaacttaagagataatggcctaaaaccacagagagtatattcaaagataagtatagcacttcttatttggaaaccaatgcttactaaatgagactaagacgtgtcccatcaaaaatcctggacctatgcctaaaacacatttcacaatccctgaacttttcaaaaattggtacatgctttaactttaaactacaggcctcactggagctacagacaagaaggtgaaaaacggctgacaaaagaagtcctggtatcttctatggtgggagaagaaaactagctaaagggaagaataaattagagaaaaattggaatgactgaatcggaacaaggcaaaggctataaaaaaaattaagcagcagtatcctcttgggggccccttccccacactatctcaatgcaaatatctgtctgaaacggtccctggctaaactccacccatgggttggccagccttgccttgaccaatagccttgacaaggcaaacttgaccaatagtcttagagtatccagtgaggccaggggccggcggctggctagggatgaagaataaaaggaagcacccttcagcagttccacacactcgcttctggaacgtctgaggttatcaataagctcctagtccagacgccatgggtcatttcacagaggaggacaaggctactatcacaagcctgtggggcaaggtgaatgtggaagatgctggaggagaaaccctgggaaggtaggctctggtgaccaggacaagggagggaaggaaggaccctgtgcctggcaaaagtccaggtcgcttctcaggatttgtggcaccttctgactgtcaaactgttcttgtcaatctcacaggctcctggttgtctacccatggacccagaggttctttgacagctttggcaacctgtcctctgcctctgccatcatgggcaaccccaaagtcaaggcacatggcaagaaggtgctgacttccttgggagatgccataaagcacctggatgatctcaagggcacctttgcccagctgagtgaactgcactgtgacaagctgcatgtggatcctgagaacttcaaggtgagtccaggagatgtttcagcactgttgcctttagtctcgaggcaacttagacaactgagtattgatctgagcacagcagggtgtgagctgtttgaagatactggggttgggagtgaagaaactgcagaggactaactgggctgagacccagtggcaatgttttagggcctaaggagtgcctctgaaaatctagatggacaactttgactttgagaaaagagaggtggaaatgaggaaaatgacttttctttattagatttcggtagaaagaactttcacctttcccctatttttgttattcgttttaaaacatctatctggaggcaggacaagtatggtcattaaaaagatgcaggcagaaggcatatattggctcagtcaaagtggggaactttggtggccaaacatacattgctaaggctattcctatatcagctggacacatataaaatgctgctaatgcttcattacaaacttatatcctttaattccagatgggggcaaagtatgtccaggggtgaggaacaattgaaacatttgggctggagtagattttgaaagtcagctctgtgtgtgtgtgtgtgtgtgtgcgcgcgtgtgtttgtgtgtgtgtgagagcgtgtgtttcttttaacgttttcagcctacagcatacagggttcatggtggcaagaagataacaagatttaaattatggccagtgactagtgctgcaagaagaacaactacctgcatttaatgggaaagcaaaatctcaggctttgagggaagttaacataggcttgattctgggtggaagcttggtgtgtagttatctggaggccaggctggagctctcagctcactatgggttcatctttattgtctcctttcatctcaacagctcctgggaaatgtgctggtgaccgttttggcaatccatttcggcaaagaattcacccctgaggtgcaggcttcctggcagaagatggtgactggagtggccagtgccctgtcctccagataccactgagctcactgcccatgatgcagagctttcaaggataggctttattctgcaagcaatcaaataataaatctattctgctaagagatcacacatggttgtcttcagttctttttttatgtctttttaaatatatgagccacaaagggttttatgttgagggatgtgtttatgtgtatttatacatggctatgtgtgtttgtgtcatgtgcacactccacacttttttgtttacgttagatgtgggttttgatgagcaaataaaagaactaggcaataaagaaacttgtacatgggagttctgcaagtgggagtaaaaggtgcaggagaaatctggttggaagaaagacctctataggacaggactcctcagaaacagatgttttggaagagatggggaaaggttcagtgaa

SEQ ID NO: 904 - DNA, 87 bp, synthetic construct
  misc_feature 1..87: note = ssODN1 5' homology arm
  source 1..87: mol_type = other DNA
gggtgcttccttttattcttcatccctagccagccgccggcccctggcctcactggatactctaagactattggtcaagtttgcctt

SEQ ID NO: 905 - DNA, 89 bp, synthetic construct
  misc_feature 1..89: note = ssODN1 3' homology arm
  source 1..89: mol_type = other DNA
gtcaaggcaaggctggccaacccatgggtggagtttagccagggaccgtttcagacagatatttgcattgagatagtgtggggaagggg

SEQ ID NO: 906 - DNA, 176 bp, synthetic construct
  misc_feature 1..176: note = ssODN1
  source 1..176: mol_type = other DNA
gggtgcttccttttattcttcatccctagccagccgccggcccctggcctcactggatactctaagactattggtcaagtttgccttgtcaaggcaaggctggccaacccatgggtggagtttagccagggaccgtttcagacagatatttgcattgagatagtgtggggaagggg

SEQ ID NO: 907 - DNA, 87 bp, synthetic construct; identical to SEQ ID NO: 904
  misc_feature 1..87: note = PhTx ssODN1 5' homology arm
  misc_feature 1: note = Modified to contain phosphorothioate
  source 1..87: mol_type = other DNA

SEQ ID NO: 908 - DNA, 89 bp, synthetic construct; identical to SEQ ID NO: 905
  misc_feature 1..89: note = PhTx ssODN1 3' homology arm
  misc_feature 89: note = Modified to contain phosphorothioate
  source 1..89: mol_type = other DNA

SEQ ID NO: 909 - DNA, 176 bp, synthetic construct; identical to SEQ ID NO: 906
  misc_feature 1..176: note = PhTx ssODN1
  misc_feature 1: note = Modified to contain phosphorothioate
  misc_feature 176: note = Modified to contain phosphorothioate
  source 1..176: mol_type = other DNA

SEQ ID NO: 910 - DNA, 17 bp, synthetic construct
  misc_feature 1..17: note = Sp9 targeting domain
  source 1..17: mol_type = other DNA
ggctattggtcaaggca

SEQ ID NO: 911 - DNA, 20 bp, synthetic construct
  misc_feature 1..20: note = Sp36 targeting domain
  source 1..20: mol_type = other DNA
caaggctattggtcaaggca

SEQ ID NO: 912 - DNA, 17 bp, synthetic construct
  misc_feature 1..17: note = Sp40 targeting domain
  source 1..17: mol_type = other DNA
tgccttgtcaaggctat

SEQ ID NO: 913 - DNA, 20 bp, synthetic construct
  misc_feature 1..20: note = Sp42 targeting domain
  source 1..20: mol_type = other DNA
gtttgccttgtcaaggctat

SEQ ID NO: 914 - DNA, 17 bp, synthetic construct
  misc_feature 1..17: note = Sp38 targeting domain
  source 1..17: mol_type = other DNA
gaccaatagccttgaca

SEQ ID NO: 915 - DNA, 20 bp, synthetic construct
  misc_feature 1..20: note = Sp37 targeting domain
  source 1..20: mol_type = other DNA
cttgaccaatagccttgaca

SEQ ID NO: 916 - DNA, 17 bp, synthetic construct
  misc_feature 1..17: note = Sp43 targeting domain
  source 1..17: mol_type = other DNA
gtcaaggctattggtca

SEQ ID NO: 917 - DNA, 20 bp, synthetic construct
  misc_feature 1..20: note = Sp35 targeting domain
  source 1..20: mol_type = other DNA
cttgtcaaggctattggtca

SEQ ID NO: 918 - DNA, 17 bp, synthetic construct
  misc_feature 1..17: note = Sp41 targeting domain
  source 1..17: mol_type = other DNA
tcaagtttgccttgtca

SEQ ID NO: 919 - DNA, 20 bp, synthetic construct
  misc_feature 1..20: note = Sp34 targeting domain
  source 1..20: mol_type = other DNA
tggtcaagtttgccttgtca

SEQ ID NO: 920 - RNA, 20 nt, synthetic construct
  misc_feature 1..20: note = Sp9 targeting domain plus PAM (NGG)
  source 1..20: mol_type = other RNA
ggctattggtcaaggcaagg

SEQ ID NO: 921 - RNA, 23 nt, synthetic construct
  misc_feature 1..23: note = Sp36 targeting domain plus PAM (NGG)
  source 1..23: mol_type = other RNA
caaggctattggtcaaggcaagg

SEQ ID NO: 922 - RNA, 20 nt, synthetic construct
  misc_feature 1..20: note = Sp40 targeting domain plus PAM (NGG)
  source 1..20: mol_type = other RNA
tgccttgtcaaggctattgg

SEQ ID NO: 923 - RNA, 23 nt, synthetic construct
  misc_feature 1..23: note = Sp42 targeting domain plus PAM (NGG)
  source 1..23: mol_type = other RNA
gtttgccttgtcaaggctattgg

SEQ ID NO: 924 - RNA, 20 nt, synthetic construct
  misc_feature 1..20: note = Sp38 targeting domain plus PAM (NGG)
  source 1..20: mol_type = other RNA
gaccaatagccttgacaagg

SEQ ID NO: 925 - RNA, 23 nt, synthetic construct
  misc_feature 1..23: note = Sp37 targeting domain plus PAM (NGG)
  source 1..23: mol_type = other RNA
cttgaccaatagccttgacaagg

SEQ ID NO: 926 - RNA, 20 nt, synthetic construct
  misc_feature 1..20: note = Sp43 targeting domain plus PAM (NGG)
  source 1..20: mol_type = other RNA
gtcaaggctattggtcaagg

SEQ ID NO: 927 - RNA, 23 nt, synthetic construct
  misc_feature 1..23: note = Sp35 targeting domain plus PAM (NGG)
  source 1..23: mol_type = other RNA
cttgtcaaggctattggtcaagg

SEQ ID NO: 928 - RNA, 20 nt, synthetic construct
  misc_feature 1..20: note = Sp41 targeting domain plus PAM (NGG)
  source 1..20: mol_type = other RNA
tcaagtttgccttgtcaagg

SEQ ID NO: 929 - RNA, 23 nt, synthetic construct
  misc_feature 1..23: note = Sp34 targeting domain plus PAM (NGG)
  source 1..23: mol_type = other RNA
tggtcaagtttgccttgtcaagg

SEQ ID NO: 930 - DNA, 20 bp, synthetic construct
  misc_feature 1..20: note = Sp9 targeting domain plus PAM (NGG)
  source 1..20: mol_type = other DNA
ggctattggtcaaggcaagg

SEQ ID NO: 931 - DNA, 23 bp, synthetic construct
  misc_feature 1..23: note = Sp36 targeting domain plus PAM (NGG)
  source 1..23: mol_type = other DNA
caaggctattggtcaaggcaagg

SEQ ID NO: 932 - DNA, 20 bp, synthetic construct
  misc_feature 1..20: note = Sp40 targeting domain plus PAM (NGG)
  source 1..20: mol_type = other DNA
tgccttgtcaaggctattgg

SEQ ID NO: 933 - DNA, 23 bp, synthetic construct
  misc_feature 1..23: note = Sp42 targeting domain plus PAM (NGG)
  source 1..23: mol_type = other DNA
gtttgccttgtcaaggctattgg

SEQ ID NO: 934 - DNA, 20 bp, synthetic construct
  misc_feature 1..20: note = Sp38 targeting domain plus PAM (NGG)
  source 1..20: mol_type = other DNA
gaccaatagccttgacaagg

SEQ ID NO: 935 - DNA, 23 bp, synthetic construct
  misc_feature 1..23: note = Sp37 targeting domain plus PAM (NGG)
  source 1..23: mol_type = other DNA
cttgaccaatagccttgacaagg

SEQ ID NO: 936 - DNA, 20 bp, synthetic construct
  misc_feature 1..20: note = Sp43 targeting domain plus PAM (NGG)
  source 1..20: mol_type = other DNA
gtcaaggctattggtcaagg

SEQ ID NO: 937 - DNA, 23 bp, synthetic construct
  misc_feature 1..23: note = Sp35 targeting domain plus PAM (NGG)
  source 1..23: mol_type = other DNA
cttgtcaaggctattggtcaagg

SEQ ID NO: 938 - DNA, 20 bp, synthetic construct
  misc_feature 1..20: note = Sp41 targeting domain plus PAM (NGG)
  source 1..20: mol_type = other DNA
tcaagtttgccttgtcaagg

SEQ ID NO: 939 - DNA, 23 bp, synthetic construct
  misc_feature 1..23: note = Sp34 targeting domain plus PAM (NGG)
  source 1..23: mol_type = other DNA
tggtcaagtttgccttgtcaagg

SEQ ID NO: 940 - RNA, 17 nt, synthetic construct
  misc_feature 1..17: note = Sp85 targeting domain
  source 1..17: mol_type = other RNA
agtatccagtgaggcca

SEQ ID NO: 941 - RNA, 20 nt, synthetic construct
  misc_feature 1..20: note = SpA targeting domain
  source 1..20: mol_type = other RNA
ggcaaggctggccaacccat

SEQ ID NO: 942 - RNA, 20 nt, synthetic construct
  misc_feature 1..20: note = SpB targeting domain
  source 1..20: mol_type = other RNA
tatttgcattgagatagtgt

SEQ ID NO: 943 - DNA, 17 bp, synthetic construct
  misc_feature 1..17: note = Sp85 targeting domain
  source 1..17: mol_type = other DNA
agtatccagtgaggcca

SEQ ID NO: 944 - DNA, 20 bp, synthetic construct
  misc_feature 1..20: note = SpA targeting domain
  source 1..20: mol_type = other DNA
ggcaaggctggccaacccat

SEQ ID NO: 945 - DNA, 20 bp, synthetic construct
  misc_feature 1..20: note = SpB targeting domain
  source 1..20: mol_type = other DNA
tatttgcattgagatagtgt

SEQ ID NO: 946 - RNA, 20 nt, synthetic construct
  misc_feature 1..20: note = Sp85 targeting domain plus PAM (NGG)
  source 1..20: mol_type = other RNA
agtatccagtgaggccaggg

SEQ ID NO: 947 - RNA, 23 nt, synthetic construct
  misc_feature 1..23: note = SpA targeting domain plus PAM (NGG)
  source 1..23: mol_type = other RNA
ggcaaggctggccaacccatggg

SEQ ID NO: 948 - RNA, 23 nt, synthetic construct
  misc_feature 1..23: note = SpB targeting domain plus PAM (NGG)
  source 1..23: mol_type = other RNA
tatttgcattgagatagtgtggg

SEQ ID NO: 949 - DNA, 20 bp, synthetic construct
  misc_feature 1..20: note = Sp85 targeting domain plus PAM (NGG)
  source 1..20: mol_type = other DNA
agtatccagtgaggccaggg

SEQ ID NO: 950 - DNA, 23 bp, synthetic construct
  misc_feature 1..23: note = SpA targeting domain plus PAM (NGG)
  source 1..23: mol_type = other DNA
ggcaaggctggccaacccatggg

SEQ ID NO: 951 - DNA, 23 bp, synthetic construct
  misc_feature 1..23: note = SpB targeting domain plus PAM (NGG)
  source 1..23: mol_type = other DNA
tatttgcattgagatagtgtggg

SEQ ID NO: 952 - RNA, 20 nt, synthetic construct
  misc_feature 1..20: note = SpK targeting domain
  source 1..20: mol_type = other RNA
ctaacagttgcttttatcac

SEQ ID NO: 953 - RNA, 20 nt, synthetic construct
  misc_feature 1..20: note = SpM targeting domain
  source 1..20: mol_type = other RNA
gggcgtgggtggggtagaag

SEQ ID NO: 954 - RNA, 20 nt, synthetic construct
  misc_feature 1..20: note = SpN targeting domain
  source 1..20: mol_type = other RNA
ctcttagacataacacacca

SEQ ID NO: 955 - RNA, 20 nt, synthetic construct
  misc_feature 1..20: note = SpC targeting domain
  source 1..20: mol_type = other RNA
atcagaggccaaacccttcc

SEQ ID NO: 956 - DNA, 20 bp, synthetic construct
  misc_feature 1..20: note = SpK targeting domain
  source 1..20: mol_type = other DNA
ctaacagttgcttttatcac

SEQ ID NO: 957 - DNA, 20 bp, synthetic construct
  misc_feature 1..20: note = SpM targeting domain
  source 1..20: mol_type = other DNA
gggcgtgggtggggtagaag

SEQ ID NO: 958 - DNA, 20 bp, synthetic construct
  misc_feature 1..20: note = SpN targeting domain
  source 1..20: mol_type = other DNA
ctcttagacataacacacca

SEQ ID NO: 959 - DNA, 20 bp, synthetic construct
  misc_feature 1..20: note = SpC targeting domain
  source 1..20: mol_type = other DNA
atcagaggccaaacccttcc

SEQ ID NO: 960 - RNA, 23 nt, synthetic construct
  misc_feature 1..23: note = SpK targeting domain plus PAM (NGG)
  source 1..23: mol_type = other RNA
ctaacagttgcttttatcacagg

SEQ ID NO: 961 - RNA, 23 nt, synthetic construct
  misc_feature 1..23: note = SpM targeting domain plus PAM (NGG)
  source 1..23: mol_type = other RNA
gggcgtgggtggggtagaagagg

SEQ ID NO: 962 - RNA, 23 nt, synthetic construct
  misc_feature 1..23: note = SpN targeting domain plus PAM (NGG)
  source 1..23: mol_type = other RNA
ctcttagacataacacaccaggg

SEQ ID NO: 963 - RNA, 23 nt, synthetic construct
  misc_feature 1..23: note = SpC targeting domain plus PAM (NGG)
  source 1..23: mol_type = other RNA
atcagaggccaaacccttcctgg

SEQ ID NO: 964 - DNA, 23 bp, synthetic construct
  misc_feature 1..23: note = SpK targeting domain plus PAM (NGG)
  source 1..23: mol_type = other DNA
ctaacagttgcttttatcacagg

SEQ ID NO: 965 - DNA, 23 bp, synthetic construct
  misc_feature 1..23: note = SpM targeting domain plus PAM (NGG)
  source 1..23: mol_type = other DNA
gggcgtgggtggggtagaagagg

SEQ ID NO: 966 - DNA, 23 bp, synthetic construct
  misc_feature 1..23: note = SpN targeting domain plus PAM (NGG)
  source 1..23: mol_type = other DNA
ctcttagacataacacaccaggg

SEQ ID NO: 967 - DNA, 23 bp, synthetic construct
  misc_feature 1..23: note = SpC targeting domain plus PAM (NGG)
  source 1..23: mol_type = other DNA
atcagaggccaaacccttcctgg

SEQ ID NO: 968 - DNA, 115 bp, Homo sapiens
  source 1..115: mol_type = other DNA
caactttgaagctagtctagtgcaagctaacagttgcttttatcacaggctccaggaagggtttggcctctgattagggtgggggcgtgggtggggtagaagaggactggcagac

SEQ ID NO: 969 - DNA, 801 bp, Homo sapiens
  source 1..801: mol_type = other DNA
aggtaccttttgtgtgtatgtgctgattgagggcccattgagaatattttgacttttagggaagctccaaactctcaaaccacagggatcacaacacatacgtgtgtctgttatgacgttatatgtaagcatcacaacaggcagagaatgtctgcaccccaccctggaaaacagcctgactgtgccccatgggcaaaccagactagtttatagggggttctactctgaggtactgatggaccttgggtgctattcctgtgataaggaaggcagctagacaggacttgggagttatctgtagtgagatggctgaaaagcgatacagggctggctctatgccccaggtgtgcataagtaagagcagatagctgattccagtgcaaagtccatacaggtaataacataggccagaaaagagatatggcatctactcttagacataacacaccagggtcaatacaactttgaagctagtctagtgcaagctaacagttgcttttatcacaggctccaggaagggtttggcctctgattagggtgggggcgtgggtggggtagaagaggactggcagacctctccatcggtggccgtttgcccaggggggcctctttcggaaggctctcttggtgatggagaattggattttatttctcaatgggaatgaaataatttgtatgccatgccgtgtggactcccaaaattgtaaaggaggtgaagcttcccctgtctgcactctcccctcctcataattgtccatttttcatctgtcgggctgtccacccatccatcacatataggca

SEQ ID NO: 970 - RNA, 15 nt, synthetic construct
  misc_feature 1..15: note = tSpA dgRNA targeting domain
  source 1..15: mol_type = other RNA
ggctggccaacccat

SEQ ID NO: 971 - DNA, 15 bp, synthetic construct
  misc_feature 1..15: note = tSpA dgRNA targeting domain
  source 1..15: mol_type = other DNA
ggctggccaacccat

SEQ ID NO: 972 - RNA, 15 nt, synthetic construct
  misc_feature 1..15: note = Sp180 dgRNA targeting domain
  source 1..15: mol_type = other RNA
gccggcggctggcta

SEQ ID NO: 973 - DNA, 15 bp, synthetic construct
  misc_feature 1..15: note = Sp180 dgRNA targeting domain
  source 1..15: mol_type = other DNA
gccggcggctggcta

SEQ ID NO: 974 - RNA, 15 nt, synthetic construct
  misc_feature 1..15: note = Sp181 dgRNA targeting domain
  source 1..15: mol_type = other RNA
agtgaggccaggggc

SEQ ID NO: 975 - DNA, 15 bp, synthetic construct
  misc_feature 1..15: note = Sp181 dgRNA targeting domain
  source 1..15: mol_type = other DNA
agtgaggccaggggc

SEQ ID NO: 976 - RNA, 15 nt, synthetic construct
  misc_feature 1..15: note = Sp182 dgRNA targeting domain
  source 1..15: mol_type = other RNA
ttagagtatccagtg

SEQ ID NO: 977 - DNA, 15 bp, synthetic construct
  misc_feature 1..15: note = Sp182 dgRNA targeting domain
  source 1..15: mol_type = other DNA
ttagagtatccagtg

SEQ ID NO: 978 - DNA, 20 bp, synthetic construct
  misc_feature 1..20: note = gRNA targeting domain
  source 1..20: mol_type = other DNA
gcactgtaacaagctgcacg

SEQ ID NO: 979 - DNA, 20 bp, synthetic construct
  misc_feature 1..20: note = gRNA targeting domain
  source 1..20: mol_type = other DNA
acaacatacagggttcatgg

SEQ ID NO: 980 - DNA, 20 bp, synthetic construct
  misc_feature 1..20: note = gRNA targeting domain
  source 1..20: mol_type = other DNA
tgggggtgaagaaactgcag

SEQ ID NO: 981 - DNA, 20 bp, synthetic construct
  misc_feature 1..20: note = gRNA targeting domain
  source 1..20: mol_type = other DNA
tgagctgtttgaagatactg

SEQ ID NO: 982 - DNA, 20 bp, synthetic construct
  misc_feature 1..20: note = gRNA targeting domain
  source 1..20: mol_type = other DNA
tgaccaggacaagggaggga

SEQ ID NO: 983 - DNA, 20 bp, synthetic construct
  misc_feature 1..20: note = gRNA targeting domain
  source 1..20: mol_type = other DNA
ctggtgaccaggacaaggga

SEQ ID NO: 984 - DNA, 20 bp, synthetic construct
  misc_feature 1..20: note = gRNA targeting domain
  source 1..20: mol_type = other DNA
tctggtgaccaggacaaggg

SEQ ID NO: 985 - DNA, 20 bp, synthetic construct
  misc_feature 1..20: note = gRNA targeting domain
  source 1..20: mol_type = other DNA
agagtatccagtgaggccag

SEQ ID NO: 986 - DNA, 20 bp, synthetic construct
  misc_feature 1..20: note = gRNA targeting domain
  source 1..20: mol_type = other DNA
tagtcttagagtatccagtg

SEQ ID NO: 987 - DNA, 20 bp, synthetic construct
  misc_feature 1..20: note = gRNA targeting domain
  source 1..20: mol_type = other DNA
cattgagatagtgtggggaa

SEQ ID NO: 988 - DNA, 20 bp, synthetic construct
  misc_feature 1..20: note = gRNA targeting domain
  source 1..20: mol_type = other DNA
attgagatagtgtggggaag

SEQ ID NO: 989 - DNA, 20 bp, synthetic construct
  misc_feature 1..20: note = gRNA targeting domain
  source 1..20: mol_type = other DNA
actgaatcggaacaaggcaa

SEQ ID NO: 990 - DNA, 20 bp, synthetic construct
  misc_feature 1..20: note = gRNA targeting domain
  source 1..20: mol_type = other DNA
ggaatgactgaatcggaaca

SEQ ID NO: 991 - DNA, 20 bp, synthetic construct
  misc_feature 1..20: note = gRNA targeting domain
  source 1..20: mol_type = other DNA
gtatcctctatgatgggaga

SEQ ID NO: 992 - DNA, 20 bp, synthetic construct
  misc_feature 1..20: note = gRNA targeting domain
  source 1..20: mol_type = other DNA
acggctgacaaaagaagtcc

SEQ ID NO: 993 - DNA, 20 bp, synthetic construct
  misc_feature 1..20: note = gRNA targeting domain
  source 1..20: mol_type = other DNA
cagcacacacacttatccag

SEQ ID NO: 994 - DNA, 20 bp, synthetic construct
  misc_feature 1..20: note = gRNA targeting domain
  source 1..20: mol_type = other DNA
tgtgtgctggctgatgaccc

SEQ ID NO: 995 - DNA, 20 bp, synthetic construct
  misc_feature 1..20: note = gRNA targeting domain
  source 1..20: mol_type = other DNA
gtgtgctggctgatgaccca

SEQ ID NO: 996 - DNA, 20 bp, synthetic construct
  misc_feature 1..20: note = gRNA targeting domain
  source 1..20: mol_type = other DNA
aagagctacgccaaaaccct

SEQ ID NO: 997 - DNA, 20 bp, synthetic construct
  misc_feature 1..20: note = gRNA targeting domain
  source 1..20: mol_type = other DNA
gaagagctacgccaaaaccc

SEQ ID NO: 998 - DNA, 20 bp, synthetic construct
  misc_feature 1..20: note = gRNA targeting domain
  source 1..20: mol_type = other DNA
tctatgctcagtaaagatga

SEQ ID NO: 999 - DNA, 20 bp, synthetic construct
  misc_feature 1..20: note = gRNA targeting domain
  source 1..20: mol_type = other DNA
acagcatacagggttcatgg

SEQ ID NO: 1000 - DNA, 20 bp, synthetic construct
  misc_feature 1..20: note = gRNA targeting domain
  source 1..20: mol_type = other DNA
tgggagtgaagaaactgcag

SEQ ID NO: 1001 - DNA, 20 bp, synthetic construct
  misc_feature 1..20: note = gRNA targeting domain
  source 1..20: mol_type = other DNA
aagcagcagtatcctcttgg

SEQ ID NO: 1002 - DNA, 20 bp, synthetic construct
  misc_feature 1..20: note = gRNA targeting domain
  source 1..20: mol_type = other DNA
gtcctggtatcttctatggt

SEQ ID NO: 1003 - DNA, 20 bp, synthetic construct
  misc_feature 1..20: note = gRNA targeting domain
  source 1..20: mol_type = other DNA
agtcctggtatcttctatgg

SEQ ID NO: 1004 - DNA, 20 bp, synthetic construct
  misc_feature 1..20: note = gRNA targeting domain
  source 1..20: mol_type = other DNA
tatgtgctggctgatgaccc

SEQ ID NO: 1005 - DNA, 20 bp, synthetic construct
  misc_feature 1..20: note = gRNA targeting domain
  source 1..20: mol_type = other DNA
atgtgctggctgatgaccca

SEQ ID NO: 1006 - DNA, 20 bp, synthetic construct
  misc_feature 1..20: note = gRNA targeting domain
  source 1..20: mol_type = other DNA
gaagagctacaccaaaaccc

SEQ ID NO: 1007 - DNA, 20 bp, synthetic construct
  misc_feature 1..20: note = gRNA targeting domain
  source 1..20: mol_type = other DNA
tctatgctcggtaaagatga

SEQ ID NO: 1008 - DNA, 20 bp, synthetic construct
  misc_feature 1..20: note = gRNA targeting domain
  source 1..20: mol_type = other DNA
atagatgagagtagtagagt

SEQ ID NO: 1009 - DNA, 20 bp, synthetic construct
  misc_feature 1..20: note = gRNA targeting domain
  source 1..20: mol_type = other DNA
gtacacgggagttctgcaag

SEQ ID NO: 1010 - DNA, 20 bp, synthetic construct
  misc_feature 1..20: note = gRNA targeting domain
  source 1..20: mol_type = other DNA
tggagctctcagctcactat

SEQ ID NO: 1011 - DNA, 20 bp, synthetic construct
  misc_feature 1..20: note = gRNA targeting domain
  source 1..20: mol_type = other DNA
tagttatctggaggccaggc

SEQ ID NO: 1012 - DNA, 20 bp, synthetic construct
  misc_feature 1..20: note = gRNA targeting domain
  source 1..20: mol_type = other DNA
cttggtgtgtagttatctgg

SEQ ID NO: 1013 - DNA, 20 bp, synthetic construct
  misc_feature 1..20: note = gRNA targeting domain
  source 1..20: mol_type = other DNA
cttgattctgggtggaagct

SEQ ID NO: 1014 - DNA, 20 bp, synthetic construct
  misc_feature 1..20: note = gRNA targeting domain
  source 1..20: mol_type = other DNA
gttaacataggcttgattct

SEQ ID NO: 1015 - DNA, 20 bp, synthetic construct
  misc_feature 1..20: note = gRNA targeting domain
  source 1..20: mol_type = other DNA
gctttgagggaagttaacat

SEQ ID NO: 1016 - DNA, 20 bp, synthetic construct
  misc_feature 1..20: note = gRNA targeting domain
  source 1..20: mol_type = other DNA
aacaattgaaacatttgggc

SEQ ID NO: 1017 - DNA, 20 bp, synthetic construct
  misc_feature 1..20: note = gRNA targeting domain
  source 1..20: mol_type = other DNA
tttcaattgttcctcacccc

SEQ ID NO: 1018 - DNA, 20 bp, synthetic construct
  misc_feature 1..20: note = gRNA targeting domain
  source 1..20: mol_type = other DNA
tgggggcaaagtatgtccag

SEQ ID NO: 1019 - DNA, 20 bp, synthetic construct
  misc_feature 1..20: note = gRNA targeting domain
  source 1..20: mol_type = other DNA
atgggggcaaagtatgtcca

SEQ ID NO: 1020 - DNA, 20 bp, synthetic construct
  misc_feature 1..20: note = gRNA targeting domain
  source 1..20: mol_type = other DNA
tatatgtgtccagctgatat

SEQ ID NO: 1021 - DNA, 20 bp, synthetic construct
  misc_feature 1..20: note = gRNA targeting domain
  source 1..20: mol_type = other DNA
tggccaaacatacattgcta

SEQ ID NO: 1022 - DNA, 20 bp, synthetic construct
  misc_feature 1..20: note = gRNA targeting domain
  source 1..20: mol_type = other DNA
atattggctcagtcaaagtg

SEQ ID NO: 1023 - DNA, 20 bp, synthetic construct
  misc_feature 1..20: note = gRNA targeting domain
  source 1..20: mol_type = other DNA
tatggtcgttaaaaagatgc

SEQ ID NO: 1024 - DNA, 20 bp, synthetic construct
  misc_feature 1..20: note = gRNA targeting domain
  source 1..20: mol_type = other DNA
atctggaggcaggacaagta

SEQ ID NO: 1025 - DNA, 20 bp, synthetic construct
  misc_feature 1..20: note = gRNA targeting domain
  source 1..20: mol_type = other DNA
gttttaaaacatctatctgg

SEQ ID NO: 1026 - DNA, 20 bp, synthetic construct
  misc_feature 1..20: note = gRNA targeting domain
  source 1..20: mol_type = other DNA
agaaaagagaggtggaaatg

SEQ ID NO: 1027 - DNA, 20 bp, synthetic construct
  misc_feature 1..20: note = gRNA targeting domain
  source 1..20: mol_type = other DNA
tgactttgagaaaagagagg

SEQ ID NO: 1028 - DNA, 20 bp, synthetic construct
  misc_feature 1..20: note = gRNA targeting domain
  source 1..20: mol_type = other DNA
ctaactgggctgagacccag

SEQ ID NO: 1029 - DNA, 20 bp, synthetic construct
  misc_feature 1..20: note = gRNA targeting domain
  source 1..20: mol_type = other DNA
tgtttgaagatactggggtt

SEQ ID NO: 1030 - DNA, 20 bp, synthetic construct
  misc_feature 1..20: note = gRNA targeting domain
  source 1..20: mol_type = other DNA
ctgtttgaagatactggggt

SEQ ID NO: 1031 - DNA, 20 bp, synthetic construct
  misc_feature 1..20: note = gRNA targeting domain
  source 1..20: mol_type = other DNA
gtgagctgtttgaagatact

SEQ ID NO: 1032 - DNA, 20 bp, synthetic construct
  misc_feature 1..20: note = gRNA targeting domain
  source 1..20: mol_type = other DNA
tgtgagctgtttgaagatac

SEQ ID NO: 1033 - DNA, 20 bp, synthetic construct
  misc_feature 1..20: note = gRNA targeting domain
  source 1..20: mol_type = other DNA
gtattgatctgagcacagca

SEQ ID NO: 1034 - DNA, 20 bp, synthetic construct
  misc_feature 1..20: note = gRNA targeting domain
  source 1..20: mol_type = other DNA
agaacagtttgacagtcaga

SEQ ID NO: 1035 - DNA, 20 bp, synthetic construct
  misc_feature 1..20: note = gRNA targeting domain
  source 1..20: mol_type = other DNA
ggctctggtgaccaggacaa

SEQ ID NO: 1036 - DNA, 20 bp, synthetic construct
  misc_feature 1..20: note = gRNA targeting domain
  source 1..20: mol_type = other DNA
cgagtgtgtggaactgctga

SEQ ID NO: 1037 - DNA, 20 bp, synthetic construct
  misc_feature 1..20: note = gRNA targeting domain
  source 1..20: mol_type = other DNA
ccagtgaggccaggggccgg

SEQ ID NO: 1038 - DNA, 20 bp, synthetic construct
  misc_feature 1..20: note = gRNA targeting domain
  source 1..20: mol_type = other DNA
gctattggtcaaggcaaggc

SEQ ID NO: 1039 - DNA, 20 bp, synthetic construct
  misc_feature 1..20: note = gRNA targeting domain
  source 1..20: mol_type = other DNA
tatctgtctgaaacggtccc

SEQ ID NO: 1040 - DNA, 20 bp, synthetic construct
  misc_feature 1..20: note = gRNA targeting domain
  source 1..20: mol_type = other DNA
gcattgagatagtgtgggga

SEQ ID NO: 1041 - DNA, 20 bp, synthetic construct
  misc_feature 1..20: note = gRNA targeting domain
  source 1..20: mol_type = other DNA
ggagaaggaaactagctaaa

SEQ ID NO: 1042 - DNA, 20 bp, synthetic construct
  misc_feature 1..20: note = gRNA targeting domain
  source 1..20: mol_type = other DNA
gtttccttctcccatcatag

SEQ ID NO: 1043 - DNA, 20 bp, synthetic construct
  misc_feature 1..20: note = gRNA targeting domain
  source 1..20: mol_type = other DNA
agtcctggtatcctctatga

SEQ ID NO: 1044 - DNA, 20 bp, synthetic construct
  misc_feature 1..20: note = gRNA targeting domain
  source 1..20: mol_type = other DNA
ctattactgcgctgaaactg

SEQ ID NO: 1045 - DNA, 20 bp, synthetic construct
  misc_feature 1..20: note = gRNA targeting domain
  source 1..20: mol_type = other DNA
gtacggataagtagatattg

SEQ ID NO: 1046 - DNA, 20 bp, synthetic construct
  misc_feature 1..20: note = gRNA targeting domain
  source 1..20: mol_type = other DNA
agggcatgtggaaaactctg

SEQ ID NO: 1047 - DNA, 20 bp, synthetic construct
  misc_feature 1..20: note = gRNA targeting domain
  source 1..20: mol_type = other DNA
aagtcagccacctgcaaccc

SEQ ID NO: 1048 - DNA, 20 bp, synthetic construct
  misc_feature 1..20: note = gRNA targeting domain
  source 1..20: mol_type = other DNA
aacagtgctgaaacatctcc

SEQ ID NO: 1049 - DNA, 20 bp, synthetic construct
  misc_feature 1..20: note = gRNA targeting domain
  source 1..20: mol_type = other DNA
taagcagcagtatcctcttg

SEQ ID NO: 1050 - DNA, 20 bp, synthetic construct
  misc_feature 1..20: note = gRNA targeting domain
  source 1..20: mol_type = other DNA
gggagaagaaaactagctaa

SEQ ID NO: 1051 - DNA, 20 bp, synthetic construct
  misc_feature 1..20: note = gRNA targeting domain
  source 1..20: mol_type = other DNA
acagacaagaaggtgaaaaa

SEQ ID NO: 1052 - DNA, 20 bp, synthetic construct
  misc_feature 1..20: note = gRNA targeting domain
  source 1..20: mol_type = other DNA
tagtctcatttagtaagcat

SEQ ID NO: 1053 - DNA, 20 bp, synthetic construct
  misc_feature 1..20: note = gRNA targeting domain
  source 1..20: mol_type = other DNA
aagagctacaccaaaaccct

SEQ ID NO: 1054 - DNA, 20 bp, synthetic construct
  misc_feature 1..20: note = gRNA targeting domain
  source 1..20: mol_type = other DNA
agcagatataagccttacac

SEQ ID NO: 1055 - DNA, 20 bp, synthetic construct
  misc_feature 1..20: note = gRNA targeting domain
  source 1..20: mol_type = other DNA
gtagaatttggctgtttatc

SEQ ID NO: 1056 - DNA, 20 bp, synthetic construct
  misc_feature 1..20: note = gRNA targeting domain
  source 1..20: mol_type = other DNA
ccccagtggagactctgtga

SEQ ID NO: 1057 - DNA, 20 bp, synthetic construct
  misc_feature 1..20: note = gRNA targeting domain
  source 1..20: mol_type = other DNA
gttactgggaaaaaagctga

SEQ ID NO: 1058 - DNA, 20 bp, synthetic construct
  misc_feature 1..20: note = gRNA targeting domain
  source 1..20: mol_type = other DNA
ttgaggaactgacatttccc

SEQ ID NO: 1059 - DNA, 20 bp, synthetic construct
  misc_feature 1..20: note = gRNA targeting domain
  source 1..20: mol_type = other DNA
caagaaaagagagaactcgt

SEQ ID NO: 1060 - DNA, 20 bp, synthetic construct
  misc_feature 1..20: note = gRNA targeting domain
  source 1..20: mol_type = other DNA
ctctgttcaagcaagaggat

SEQ ID NO: 1061 - DNA, 20 bp, synthetic construct
  misc_feature 1..20: note = gRNA targeting domain
  source 1..20: mol_type = other DNA
accataaaaggaacaaccag

SEQ ID NO: 1062 - DNA, 20 bp, synthetic construct
  misc_feature 1..20: note = gRNA targeting domain
  source 1..20: mol_type = other DNA
catttctgaaggctgactcg

SEQ ID NO: 1063 - DNA, 20 bp, synthetic construct
  misc_feature 1..20: note = gRNA targeting domain
  source 1..20: mol_type = other DNA
tgtaagactctgggggaggt

SEQ ID NO: 1064 - DNA, 20 bp, synthetic construct
  misc_feature 1..20: note = gRNA targeting domain
  source 1..20: mol_type = other DNA
acctcattgtaagactctgg

SEQ ID NO: 1065 - DNA, 20 bp, synthetic construct
  misc_feature 1..20: note = gRNA targeting domain
  source 1..20: mol_type = other DNA
gagacctcattgtaagactc

SEQ ID NO: 1066 - DNA, 20 bp, synthetic construct
  misc_feature 1..20: note = gRNA targeting domain
  source 1..20: mol_type = other DNA
tcccccagagtcttacaatg

SEQ ID NO: 1067 - DNA, 20 bp, synthetic construct
  misc_feature 1..20: note = gRNA targeting domain
  source 1..20: mol_type = other DNA
ctgcaatcaatccagccccc

SEQ ID NO: 1068 - DNA, 20 bp, synthetic construct
  misc_feature 1..20: note = gRNA targeting domain
  source 1..20: mol_type = other DNA
aaggttcagtgaagacctgg

SEQ ID NO: 1069 - DNA, 20 bp, synthetic construct
  misc_feature 1..20: note = gRNA targeting domain
  source 1..20: mol_type = other DNA
tggtgtaggagaaatccggt

SEQ ID NO: 1070 - DNA, 20 bp, synthetic construct
  misc_feature 1..20: note = gRNA targeting domain
  source 1..20: mol_type = other DNA
cagtaaagacacttgtacac

SEQ ID NO: 1071 - DNA, 20 bp, synthetic construct
  misc_feature 1..20: note = gRNA targeting domain
  source 1..20: mol_type = other DNA
ctggagctctcagctcacta

SEQ ID NO: 1072 - DNA, 20 bp, synthetic construct
  misc_feature 1..20: note = gRNA targeting domain
  source 1..20: mol_type = other DNA
aacataggcttgattctggg

SEQ ID NO: 1073 - DNA, 20 bp, synthetic construct
  misc_feature 1..20: note = gRNA targeting domain
  source 1..20: mol_type = other DNA
actacctgcatttaatggga

SEQ ID NO: 1074 - DNA, 20 bp, synthetic construct
  misc_feature 1..20: note = gRNA targeting domain
  source 1..20: mol_type = other DNA
ccagtgactagtgcttgaag

SEQ ID NO: 1075 - DNA, 20 bp, synthetic construct
  misc_feature 1..20: note = gRNA targeting domain
  source 1..20: mol_type = other DNA
gatgggggcaaagtatgtcc

SEQ ID NO: 1076 - DNA, 20 bp, synthetic construct
  misc_feature 1..20: note = gRNA targeting domain
  source 1..20: mol_type = other DNA
tatcctttaattccagatgg

SEQ ID NO: 1077 - DNA, 20 bp, synthetic construct
  misc_feature 1..20: note = gRNA targeting domain
  source 1..20: mol_type = other DNA
atatcctttaattccagatg

SEQ ID NO: 1078 - DNA, 20 bp, synthetic construct
  misc_feature 1..20: note = gRNA targeting domain
  source 1..20: mol_type = other DNA
aaggctattcctatatcagc

SEQ ID NO: 1079 - DNA, 20 bp, synthetic construct
  misc_feature 1..20: note = gRNA targeting domain
  source 1..20: mol_type = other DNA
tagccttagcaatgtatgtt

SEQ ID NO: 1080 - DNA, 20 bp, synthetic construct
  misc_feature 1..20: note = gRNA targeting domain
  source 1..20: mol_type = other DNA
tcagtcaaagtggggaactt

SEQ ID NO: 1081 - DNA, 20 bp, synthetic construct
  misc_feature 1..20: note = gRNA targeting domain
  source 1..20: mol_type = other DNA
tatattggctcagtcaaagt

SEQ ID NO: 1082 - DNA, 20 bp, synthetic construct
  misc_feature 1..20: note = gRNA targeting domain
  source 1..20: mol_type = other DNA
gtttgaagatactggggttg

SEQ ID NO: 1083 - DNA, 20 bp, synthetic construct
  misc_feature 1..20: note = gRNA targeting domain
  source 1..20: mol_type = other DNA
gagaacttcaaggtgagtcc

SEQ ID NO: 1084 - DNA, 20 bp, synthetic construct
  misc_feature 1..20: note = gRNA targeting domain
  source 1..20: mol_type = other DNA
cttccttccctcccttgtcc

SEQ ID NO: 1085 - DNA, 20 bp, synthetic construct
  misc_feature 1..20: note = gRNA targeting domain
  source 1..20: mol_type = other DNA
aaccctgggaaggtaggctc

SEQ ID NO: 1086 - DNA, 20 bp, synthetic construct
  misc_feature 1..20: note = gRNA targeting domain
  source 1..20: mol_type = other DNA
tatccagtgaggccaggggc

SEQ ID NO: 1087 - DNA, 20 bp, synthetic construct
  misc_feature 1..20: note = gRNA targeting domain
  source 1..20: mol_type = other DNA
gggagaaggaaactagctaa

SEQ ID NO: 1088 - DNA, 20 bp, synthetic construct
  misc_feature 1..20: note = gRNA targeting domain
  source 1..20: mol_type = other DNA
gtcctggtatcctctatgat

SEQ ID NO: 1089 - DNA, 20 bp, synthetic construct
  misc_feature 1..20: note = gRNA targeting domain
  source 1..20: mol_type = other DNA
agagacaagaaggtaaaaaa

SEQ ID NO: 1090 - DNA, 20 bp, synthetic construct
  misc_feature 1..20: note = gRNA targeting domain
  source 1..20: mol_type = other DNA
cactggagctagagacaaga

SEQ ID NO: 1091 - DNA, 20 bp, synthetic construct
  misc_feature 1..20: note = gRNA targeting domain
  source 1..20: mol_type = other DNA
tcttgtctctagctccagtg

SEQ ID NO: 1092 - DNA, 20 bp, synthetic construct
  misc_feature 1..20: note = gRNA targeting domain
  source 1..20: mol_type = other DNA
ctttaaactacaggcctcac

SEQ ID NO: 1093 - DNA, 20 bp, synthetic construct
  misc_feature 1..20: note = gRNA targeting domain
  source 1..20: mol_type = other DNA
gtgaaatgtgttttaggcat

SEQ ID NO: 1094 - DNA, 20 bp, synthetic construct
  misc_feature 1..20: note = gRNA targeting domain
  source 1..20: mol_type = other DNA
agtggtaaatacacatcatc

SEQ ID NO: 1095 - DNA, 20 bp, synthetic construct
  misc_feature 1..20: note = gRNA targeting domain
  source 1..20: mol_type = other DNA
catggaaaacaactctaaag

SEQ ID NO: 1096 - DNA, 20 bp, synthetic construct
  misc_feature 1..20: note = gRNA targeting domain
  source 1..20: mol_type = other DNA
aaacaactctaaagaggcaa

SEQ ID NO: 1097 - DNA, 20 bp, synthetic construct
  misc_feature 1..20: note = gRNA targeting domain
  source 1..20: mol_type = other DNA
gacatattggaccattaaca

SEQ ID NO: 1098 - DNA, 20 bp, synthetic construct
  misc_feature 1..20: note = gRNA targeting domain
  source 1..20: mol_type = other DNA
tattggaccattaacagggt

SEQ ID NO: 1099 - DNA, 20 bp, synthetic construct
  misc_feature 1..20: note = gRNA targeting domain
  source 1..20: mol_type = other DNA
ctggaattctggcttatcgg

SEQ ID NO: 1100 - DNA, 20 bp, synthetic construct
  misc_feature 1..20: note = gRNA targeting domain
  source 1..20: mol_type = other DNA
cataggcagagtagacgcaa

SEQ ID NO: 1101 - DNA, 20 bp, synthetic construct
  misc_feature 1..20: note = gRNA targeting domain
  source 1..20: mol_type = other DNA
tgtgaaatggtagtgagtga

SEQ ID NO: 1102 - DNA, 20 bp, synthetic construct
  misc_feature 1..20: note = gRNA targeting domain
  source 1..20: mol_type = other DNA
gtgagtgatggcatttgaag

SEQ ID NO: 1103 - DNA, 20 bp, synthetic construct
  misc_feature 1..20: note = gRNA targeting domain
  source 1..20: mol_type = other DNA
acagatgagagtagtagagt

SEQ ID NO: 1104 - DNA, 20 bp, synthetic construct
  misc_feature 1..20: note = gRNA targeting domain
  source 1..20: mol_type = other DNA
tccttctggtgaggacacag

SEQ ID NO: 1105 - DNA, 20 bp, synthetic construct
  misc_feature 1..20: note = gRNA targeting domain
  source 1..20: mol_type = other DNA
cccactgtgtcctcaccaga

SEQ ID NO: 1106 - DNA, 20 bp, synthetic construct
  misc_feature 1..20: note = gRNA targeting domain
  source 1..20: mol_type = other DNA
aggaaaataattctatgatg

SEQ ID NO: 1107 - DNA, 20 bp, synthetic construct
  misc_feature 1..20: note = gRNA targeting domain
  source 1..20: mol_type = other DNA
tgtaagcttctagggaggtg

SEQ ID NO: 1108 - DNA, 20 bp, synthetic construct
  misc_feature 1..20: note = gRNA targeting domain
  source 1..20: mol_type = other DNA
ctcattgtaagcttctaggg

SEQ ID NO: 1109 - DNA, 20 bp, synthetic construct
  misc_feature 1..20: note = gRNA targeting domain
  source 1..20: mol_type = other DNA
ctccctagaagcttacaatg

SEQ ID NO: 1110 - DNA, 20 bp, synthetic construct
  misc_feature 1..20: note = gRNA targeting domain
  source 1..20: mol_type = other DNA
ctggtcacagcatttcaagg

SEQ ID NO: 1111 - DNA, 20 bp, synthetic construct
  misc_feature 1..20: note = gRNA targeting domain
  source 1..20: mol_type = other DNA
tcacttcattgtagttaccg

SEQ ID NO: 1112 - DNA, 20 bp, synthetic construct
  misc_feature 1..20: note = gRNA targeting domain
  source 1..20: mol_type = other DNA
aggggcaatactatttccaa

SEQ ID NO: 1113 - DNA, 20 bp, synthetic construct
  misc_feature 1..20: note = gRNA targeting domain
  source 1..20: mol_type = other DNA
tgaggagtcctgtcctatag

SEQ ID NO: 1114 - DNA, 20 bp, synthetic construct
  misc_feature 1..20: note = gRNA targeting domain
  source 1..20: mol_type = other DNA
gtacatgggagttctgcaag

SEQ ID NO: 1115 - DNA, 20 bp, synthetic construct
  misc_feature 1..20: note = gRNA targeting domain
  source 1..20: mol_type = other DNA
cctacagcatacagggttca

SEQ ID NO: 1116 - DNA, 20 bp, synthetic construct
  misc_feature 1..20: note = gRNA targeting domain
  source 1..20: mol_type = other DNA
ccatgaaccctgtatgctgt

SEQ ID NO: 1117 - DNA, 20 bp, synthetic construct
  misc_feature 1..20: note = gRNA targeting domain
  source 1..20: mol_type = other DNA
ttgtccatctagattttcag

SEQ ID NO: 1118 - DNA, 20 bp, synthetic construct
  misc_feature 1..20: note = gRNA targeting domain
  source 1..20: mol_type = other DNA
tcttgtctgtagctccagtg

SEQ ID NO: 1119 - DNA, 20 bp, synthetic construct
  misc_feature 1..20: note = gRNA targeting domain
  source 1..20: mol_type = other DNA
ttatattcaggtatgtatgt

SEQ ID NO: 1120 - DNA, 20 bp, synthetic construct
  misc_feature 1..20: note = gRNA targeting domain
  source 1..20: mol_type = other DNA
catggaaaacaactcttaag

SEQ ID NO: 1121 - DNA, 20 bp, synthetic construct
  misc_feature 1..20: note = gRNA targeting domain
  source 1..20: mol_type = other DNA
gacatattggccacttaaca

SEQ ID NO: 1122 - DNA, 20 bp, synthetic construct
  misc_feature 1..20: note = gRNA targeting domain
  source 1..20: mol_type = other DNA
acttctctcaatctaaggat

SEQ ID NO: 1123 - DNA, 20 bp, synthetic construct
  misc_feature 1..20: note = gRNA targeting domain
  source 1..20: mol_type = other DNA
ccatatctgagagtctggtt

SEQ ID NO: 1124 - DNA, 20 bp, synthetic construct
  misc_feature 1..20: note = gRNA targeting domain
  source 1..20: mol_type = other DNA
ccccatttatccaaaaacca

SEQ ID NO: 1125 - DNA, 20 bp, synthetic construct
  misc_feature 1..20: note = gRNA targeting domain
  source 1..20: mol_type = other DNA
gccacctccattggagcagg

SEQ ID NO: 1126 - DNA, 20 bp, synthetic construct
  misc_feature 1..20: note = gRNA targeting domain
  source 1..20: mol_type = other DNA
gtgaacccttttagctctcc

SEQ ID NO: 1127 - DNA, 20 bp, synthetic construct
  misc_feature 1..20: note = gRNA targeting domain
  source 1..20: mol_type = other DNA
catctaacataagaaggaag

SEQ ID NO: 1128 - DNA, 20 bp, synthetic construct
  misc_feature 1..20: note = gRNA targeting domain
  source 1..20: mol_type = other DNA
ggcaagccaaatgcagaaac

SEQ ID NO: 1129 - DNA, 20 bp, synthetic construct
  misc_feature 1..20: note = gRNA targeting domain
  source 1..20: mol_type = other DNA
tgtcttctgcctaattgccc

SEQ ID NO: 1130 - DNA, 20 bp, synthetic construct
  misc_feature 1..20: note = gRNA targeting domain
  source 1..20: mol_type = other DNA
aactgattcctgtgctctta

SEQ ID NO: 1131 - DNA, 20 bp, synthetic construct
  misc_feature 1..20: note = gRNA targeting domain
  source 1..20: mol_type = other DNA
attttctgaaagtcattttg

SEQ ID NO: 1132 - DNA, 20 bp, synthetic construct
  misc_feature 1..20: note = gRNA targeting domain
  source 1..20: mol_type = other DNA
agcacggtaacatgctgtac

SEQ ID NO: 1133 - DNA, 20 bp, synthetic construct
  misc_feature 1..20: note = gRNA targeting domain
  source 1..20: mol_type = other DNA
atggcacagagctgggtgga

SEQ ID NO: 1134 - DNA, 20 bp, synthetic construct
  misc_feature 1..20: note = gRNA targeting domain
  source 1..20: mol_type = other DNA
gttaaactagtaaagcatgg

SEQ ID NO: 1135 - DNA, 20 bp, synthetic construct
  misc_feature 1..20: note = gRNA targeting domain
  source 1..20: mol_type = other DNA
taaatatctgaatataggag

SEQ ID NO: 1136 - DNA, 20 bp, synthetic construct
  misc_feature 1..20: note = gRNA targeting domain
  source 1..20: mol_type = other DNA
agagggtgggaaaagggtga

SEQ ID NO: 1137 - DNA, 20 bp, synthetic construct
  misc_feature 1..20: note = gRNA targeting domain
  source 1..20: mol_type = other DNA
gggacctagctgaaatcagc

SEQ ID NO: 1138 - DNA, 20 bp, synthetic construct
  misc_feature 1..20: note = gRNA targeting domain
  source 1..20: mol_type = other DNA
tagagcattaaatatttcag

SEQ ID NO: 1139 - DNA, 20 bp, synthetic construct
  misc_feature 1..20: note = gRNA targeting domain
  source 1..20: mol_type = other DNA
aaccaaccctaaatctctat

SEQ ID NO: 1140 - DNA, 20 bp, synthetic construct
  misc_feature 1..20: note = gRNA targeting domain
  source 1..20: mol_type = other DNA
cccctctaatgtgaagtctt

SEQ ID NO: 1141 - DNA, 20 bp, synthetic construct
  misc_feature 1..20: note = gRNA targeting domain
  source 1..20: mol_type = other DNA
atttattagcatgagtacta

SEQ ID NO: 1142 - DNA, 20 bp, synthetic construct
  misc_feature 1..20: note = gRNA targeting domain
  source 1..20: mol_type = other DNA
gagactagaaagaatcttga

SEQ ID NO: 1143 - DNA, 20 bp, synthetic construct
  misc_feature 1..20: note = gRNA targeting domain
  source 1..20: mol_type = other DNA
acggaggtgggtggatcatg

SEQ ID NO: 1144 - DNA, 20 bp, synthetic construct
  misc_feature 1..20: note = gRNA targeting domain
  source 1..20: mol_type = other DNA
acaagtgtacacataggatg

SEQ ID NO: 1145 - DNA, 20 bp, synthetic construct
  misc_feature 1..20: note = gRNA targeting domain
  source 1..20: mol_type = other DNA
gttgcattgggaagagacta

SEQ ID NO: 1146 - DNA, 20 bp, synthetic construct
  misc_feature 1..20: note = gRNA targeting domain
  source 1..20: mol_type = other DNA
cttctgctggaaccgggtca

SEQ ID NO: 1147 - DNA, 20 bp, synthetic construct
  misc_feature 1..20: note = gRNA targeting domain
  source 1..20: mol_type = other DNA
ctctgtgtcatctccttcca

SEQ ID NO: 1148 - DNA, 20 bp, synthetic construct
  misc_feature 1..20: note = gRNA targeting domain
  source 1..20: mol_type = other DNA
aaggtcttgaaaccatagtg

SEQ ID NO: 1149 - DNA, 20 bp, synthetic construct
  misc_feature 1..20: note = gRNA targeting domain
  source 1..20: mol_type = other DNA
aggttgcctaaaagatagcc

SEQ ID NO: 1150 - DNA, 20 bp, synthetic construct
  misc_feature 1..20: note = gRNA targeting domain
  source 1..20: mol_type = other DNA
catataaaatctaaaaaata

SEQ ID NO: 1151 - DNA, 20 bp, synthetic construct
  misc_feature 1..20: note = gRNA targeting domain
  source 1..20: mol_type = other DNA
ccagctttgttttacagcaa

SEQ ID NO: 1152 - DNA, 20 bp, synthetic construct
  misc_feature 1..20: note = gRNA targeting domain
  source 1..20: mol_type = other DNA
aaagatgtaatagaagaggc

SEQ ID NO: 1153 - DNA, 20 bp, synthetic construct
  misc_feature 1..20: note = gRNA targeting domain
  source 1..20: mol_type = other DNA
aagatactgtatcttaggag

SEQ ID NO: 1154 - DNA, 20 bp, synthetic construct
  misc_feature 1..20: note = gRNA targeting domain
  source 1..20: mol_type = other DNA
gaattctctagaggtgacaa

SEQ ID NO: 1155 - DNA, 20 bp, synthetic construct
  misc_feature 1..20: note = gRNA targeting domain
  source 1..20: mol_type = other DNA
ttgattattaaatatatata

SEQ ID NO: 1156 - DNA, 20 bp, synthetic construct
  misc_feature 1..20: note = gRNA targeting domain
  source 1..20: mol_type = other DNA
tgtagtcccagtaacccagg

SEQ ID NO: 1157 - DNA, 20 bp, synthetic construct
  misc_feature 1..20: note = gRNA targeting domain
  source 1..20: mol_type = other DNA
tcatctcacagggaagtgcc

SEQ ID NO: 1158 - DNA, 20 bp, synthetic construct
  misc_feature 1..20: note = gRNA targeting domain
  source 1..20: mol_type = other DNA
gaaaagagtaaacagtcaaa

SEQ ID NO: 1159 - DNA, 20 bp, synthetic construct
  misc_feature 1..20: note = gRNA targeting domain
  source 1..20: mol_type = other DNA
aatgggacttccatttgggg

SEQ ID NO: 1160 - DNA, 20 bp, synthetic construct
  misc_feature 1..20: note = gRNA targeting domain
  source 1..20: mol_type = other DNA
actatcaatggggtaatcag

SEQ ID NO: 1161 - DNA, 20 bp, synthetic construct
  misc_feature 1..20: note = gRNA targeting domain
  source 1..20: mol_type = other DNA
gtcaaataggaggttaactg

SEQ ID NO: 1162 - DNA, 20 bp, synthetic construct
  misc_feature 1..20: note = gRNA targeting domain
  source 1..20: mol_type = other DNA
taatctgcaagagtgtctgg

SEQ ID NO: 1163 - DNA, 20 bp, synthetic construct
  misc_feature 1..20: note = gRNA targeting domain
  source 1..20: mol_type = other DNA
agtacagggggatgggagaa

SEQ ID NO: 1164 - DNA, 20 bp, synthetic construct
  misc_feature 1..20: note = gRNA targeting domain
  source 1..20: mol_type = other DNA
agggtctcagtgttccctaa

SEQ ID NO: 1165 - DNA, 20 bp, synthetic construct
  misc_feature 1..20: note = gRNA targeting domain
  source 1..20: mol_type = other DNA
agagacagcgagagagacag

SEQ ID NO: 1166 - DNA, 20 bp, synthetic construct
  misc_feature 1..20: note = gRNA targeting domain
  source 1..20: mol_type = other DNA
acatgtaggcattaattcag

SEQ ID NO: 1167 - DNA, 20 bp, synthetic construct
  misc_feature 1..20: note = gRNA targeting domain
  source 1..20: mol_type = other DNA
aacaaagaaacactgtgcga

SEQ ID NO: 1168 - DNA, 20 bp, synthetic construct
  misc_feature 1..20: note = gRNA targeting domain
  source 1..20: mol_type = other DNA
aggaaaaataaataatggag

SEQ ID NO: 1169 - DNA, 20 bp, synthetic construct
  misc_feature 1..20: note = gRNA targeting domain
  source 1..20: mol_type = other DNA
tttatttgtatatagaaaga

SEQ ID NO: 1170 - DNA, 20 bp, synthetic construct
  misc_feature 1..20: note = gRNA targeting domain
  source 1..20: mol_type = other DNA
cttgctgttggtttcagagc

SEQ ID NO: 1171 - DNA, 20 bp, synthetic construct
  misc_feature 1..20: note = gRNA targeting domain
  source 1..20: mol_type = other DNA
tgaaacaaaaaggaaaaggt

SEQ ID NO: 1172 - DNA, 20 bp, synthetic construct
  misc_feature 1..20: note = gRNA targeting domain
  source 1..20: mol_type = other DNA
attagaattgtggagagcac

SEQ ID NO: 1173 - DNA, 20 bp, synthetic construct
  misc_feature 1..20: note = gRNA targeting domain
  source 1..20: mol_type = other DNA
atacagagaacactgaggga

SEQ ID NO: 1174 - DNA, 20 bp, synthetic construct
  misc_feature 1..20: note = gRNA targeting domain
  source 1..20: mol_type = other DNA
tacatgcgactgaaagggtg

SEQ ID NO: 1175 - DNA, 20 bp, synthetic construct
  misc_feature 1..20: note = gRNA targeting domain
  source 1..20: mol_type = other DNA
gagccagaactgtctaatgg

SEQ ID NO: 1176 - DNA, 20 bp, synthetic construct
  misc_feature 1..20: note = gRNA targeting domain
  source 1..20: mol_type = other DNA
agagagccagaactgtctaa

SEQ ID NO: 1177 - DNA, 20 bp, synthetic construct
  misc_feature 1..20: note = gRNA targeting domain
  source 1..20: mol_type = other DNA
tacatgctgttcatttactc

SEQ ID NO: 1178 - DNA, 20 bp, synthetic construct
  misc_feature 1..20: note = gRNA targeting domain
  source 1..20: mol_type = other DNA
gagtgacattcagaagggca

SEQ ID NO: 1179 - DNA, 20 bp, synthetic construct
  misc_feature 1..20: note = gRNA targeting domain
  source 1..20: mol_type = other DNA
cctcaccatatctcttgagt

SEQ ID NO: 1180 - DNA, 20 bp, synthetic construct
  misc_feature 1..20: note = gRNA targeting domain
  source 1..20: mol_type = other DNA
ttctaaaacctctttctttg

SEQ ID NO: 1181 - DNA, 20 bp, synthetic construct
  misc_feature 1..20: note = gRNA targeting domain
  source 1..20: mol_type = other DNA
aaatatgtttcaggtcacag

SEQ ID NO: 1182 - DNA, 20 bp, synthetic construct
  misc_feature 1..20: note = gRNA targeting domain
  source 1..20: mol_type = other DNA
tcaatggaggtactctttgg

SEQ ID NO: 1183 - DNA, 20 bp, synthetic construct
  misc_feature 1..20: note = gRNA targeting domain
  source 1..20: mol_type = other DNA
ggtaaaatcctcgctgaagt

SEQ ID NO: 1184 - DNA, 20 bp, synthetic construct
  misc_feature 1..20: note = gRNA targeting domain
  source 1..20: mol_type = other DNA
agtaggataatagtacttca

SEQ ID NO: 1185 - DNA, 20 bp, synthetic construct
  misc_feature 1..20: note = gRNA targeting domain
  source 1..20: mol_type = other DNA
atgtatgtatgtgatgactg

SEQ ID NO: 1186 - DNA, 20 bp, synthetic construct
  misc_feature 1..20: note = gRNA targeting domain
  source 1..20: mol_type = other DNA
ggtacttttgaaagcagagg

SEQ ID NO: 1187 - DNA, 20 bp, synthetic construct
  misc_feature 1..20: note = gRNA targeting domain
  source 1..20: mol_type = other DNA
atgggtacttttgaaagcag

SEQ ID NO: 1188 - DNA, 20 bp, synthetic construct
  misc_feature 1..20: note = gRNA targeting domain
  source 1..20: mol_type = other DNA
caaagtacctctaggtccat

SEQ ID NO: 1189 - DNA, 20 bp, synthetic construct
  misc_feature 1..20: note = gRNA targeting domain
  source 1..20: mol_type = other DNA
gtagacaaccaggagactgt

SEQ ID NO: 1190 - DNA, 20 bp, synthetic construct
  misc_feature 1..20: note = gRNA targeting domain
  source 1..20: mol_type = other DNA
agtcagactatgtaagacaa

SEQ ID NO: 1191 - DNA, 20 bp, synthetic construct
  misc_feature 1..20: note = gRNA targeting domain
  source 1..20: mol_type = other DNA
gtcagactatgtaagacaac

SEQ ID NO: 1192 - DNA, 20 bp, synthetic construct
  misc_feature 1..20: note = gRNA targeting domain
  source 1..20: mol_type = other DNA
ggttaaggtgagaaggctgg

SEQ ID NO: 1193 - DNA, 20 bp, synthetic construct
  misc_feature 1..20: note = gRNA targeting domain
  source 1..20: mol_type = other DNA
gaagcaaggttaaggtgaga

SEQ ID NO: 1194 - DNA, 20 bp, synthetic construct
  misc_feature 1..20: note = gRNA targeting domain
  source 1..20: mol_type = other DNA
cacacatgaagcagcaatgc

SEQ ID NO: 1195 - DNA, 20 bp, synthetic construct
  misc_feature 1..20: note = gRNA targeting domain
  source 1..20: mol_type = other DNA
tgaatctattggtcaagggt

SEQ ID NO: 1196 - DNA, 20 bp, synthetic construct
  misc_feature 1..20: note = gRNA targeting domain
  source 1..20: mol_type = other DNA
gtgtaggaaaatggagggga

SEQ ID NO: 1197 - DNA, 20 bp, synthetic construct
  misc_feature 1..20: note = gRNA targeting domain
  source 1..20: mol_type = other DNA
cttcactgacaatattccac

SEQ ID NO: 1198 - DNA, 20 bp, synthetic construct
  misc_feature 1..20: note = gRNA targeting domain
  source 1..20: mol_type = other DNA
agtctccttgaaatacacat

SEQ ID NO: 1199 - DNA, 20 bp, synthetic construct
  misc_feature 1..20: note = gRNA targeting domain
  source 1..20: mol_type = other DNA
ggttggctgatggaaagatg

SEQ ID NO: 1200 - DNA, 20 bp, synthetic construct
  misc_feature 1..20: note = gRNA targeting domain
  source 1..20: mol_type = other DNA
cacagtagaagcaataatca

SEQ ID NO: 1201 - DNA, 20 bp, synthetic construct
  misc_feature 1..20: note = gRNA targeting domain
  source 1..20: mol_type = other DNA
actattcatgatataaacac

SEQ ID NO: 1202 - DNA, 20 bp, synthetic construct
  misc_feature 1..20: note = gRNA targeting domain
  source 1..20: mol_type = other DNA
agaaagtgcatattctgaaa

SEQ ID NO: 1203 - DNA, 20 bp, synthetic construct
  misc_feature 1..20: note = gRNA targeting domain
  source 1..20: mol_type = other DNA
atggagccaggcagagatgt

SEQ ID NO: 1204 - DNA, 20 bp, synthetic construct
  misc_feature 1..20: note = gRNA targeting domain
  source 1..20: mol_type = other DNA
ttgcaaacctgagataaaca

SEQ ID NO: 1205 - DNA, 20 bp, synthetic construct
  misc_feature 1..20: note = gRNA targeting domain
  source 1..20: mol_type = other DNA
aagtccgccatctgcaatcc

SEQ ID NO: 1206 - DNA, 20 bp, synthetic construct
  misc_feature 1..20: note = gRNA targeting domain
  source 1..20: mol_type = other DNA
tcccaactgaccttatctgt

SEQ ID NO: 1207 - DNA, 20 bp, synthetic construct
  misc_feature 1..20: note = gRNA targeting domain
  source 1..20: mol_type = other DNA
ctcccaactgaccttatctg

SEQ ID NO: 1208 - DNA, 20 bp, synthetic construct
  misc_feature 1..20: note = gRNA targeting domain
  source 1..20: mol_type = other DNA
ataaggtcagttgggagttg

SEQ ID NO: 1209 - DNA, 20 bp, synthetic construct
  misc_feature 1..20: note = gRNA targeting domain
  source 1..20: mol_type = other DNA
tgtaagaaatgaatcagcag

SEQ ID NO: 1210 - DNA, 20 bp, synthetic construct
  misc_feature 1..20: note = gRNA targeting domain
  source 1..20: mol_type = other DNA
gattggtcacagcatttcaa

SEQ ID NO: 1211 - DNA, 20 bp, synthetic construct
  misc_feature 1..20: note = gRNA targeting domain
  source 1..20: mol_type = other DNA
gtgaccaatctgcacacttg

SEQ ID NO: 1212 - DNA, 20 bp, synthetic construct
  misc_feature 1..20: note = gRNA targeting domain
  source 1..20: mol_type = other DNA
atctgcacacttgagggcat

SEQ ID NO: 1213 - DNA, 20 bp, synthetic construct
  misc_feature 1..20: note = gRNA targeting domain
  source 1..20: mol_type = other DNA
actttcttaggcatccacaa

SEQ ID NO: 1214 - DNA, 20 bp, synthetic construct
  misc_feature 1..20: note = gRNA targeting domain
  source 1..20: mol_type = other DNA
ttgcagctgagtagcaagga

SEQ ID NO: 1215 - DNA, 20 bp, synthetic construct
  misc_feature 1..20: note = gRNA targeting domain
  source 1..20: mol_type = other DNA
aaaggttcagtgaagacctg

SEQ ID NO: 1216 - DNA, 20 bp, synthetic construct
  misc_feature 1..20: note = gRNA targeting domain
  source 1..20: mol_type = other DNA
gaaaaggttcagtgaagacc

SEQ ID NO: 1217 - DNA, 20 bp, synthetic construct
  misc_feature 1..20: note = gRNA targeting domain
  source 1..20: mol_type = other DNA
gtgggaagaaagacctctat

SEQ ID NO: 1218 - DNA, 20 bp, synthetic construct
  misc_feature 1..20: note = gRNA targeting domain
  source 1..20: mol_type = other DNA
atggtgtaggagaaatccgg

SEQ ID NO: 1219 - DNA, 20 bp, synthetic construct
  misc_feature 1..20: note = gRNA targeting domain
  source 1..20: mol_type = other DNA
cacacaccacaaacacaaac

SEQ ID NO: 1220 - DNA, 20 bp, synthetic construct
  misc_feature 1..20: note = gRNA targeting domain
  source 1..20: mol_type = other DNA
agttaacataggcttgattc

SEQ ID NO: 1221 - DNA, 20 bp, synthetic construct
  misc_feature 1..20: note = gRNA targeting domain
  source 1..20: mol_type = other DNA
taatgggaaggcaaaatctc

SEQ ID NO: 1222 - DNA, 20 bp, synthetic construct
  misc_feature 1..20: note = gRNA targeting domain
  source 1..20: mol_type = other DNA
ccccttcaagcactagtcac

SEQ ID NO: 1223 - DNA, 20 bp, synthetic construct
  misc_feature 1..20: note = gRNA targeting domain
  source 1..20: mol_type = other DNA
agatagcaagatttaaatta

SEQ ID NO: 1224 - DNA, 20 bp, synthetic construct
  misc_feature 1..20: note = gRNA targeting domain
  source 1..20: mol_type = other DNA
tcttcagcctacaacataca

SEQ ID NO: 1225 - DNA, 20 bp, synthetic construct
  misc_feature 1..20: note = gRNA targeting domain
  source 1..20: mol_type = other DNA
gcaaagtatgtccaggggtg

SEQ ID NO: 1226 - DNA, 20 bp, synthetic construct
  misc_feature 1..20: note = gRNA targeting domain
  source 1..20: mol_type = other DNA
tatatcctttaattccagat

SEQ ID NO: 1227 - DNA, 20 bp, synthetic construct
  misc_feature 1..20: note = gRNA targeting domain
  source 1..20: mol_type = other DNA
tgcaggcagaaggcatatat

SEQ ID NO: 1228 - DNA, 20 bp, synthetic construct
  misc_feature 1..20: note = gRNA targeting domain
  source 1..20: mol_type = other DNA
gttaaaaagatgcaggcaga

SEQ ID NO: 1229 - DNA, 20 bp, synthetic construct
  misc_feature 1..20: note = gRNA targeting domain
  source 1..20: mol_type = other DNA
gaaactgcagaggactaact

SEQ ID NO: 1230 - DNA, 20 bp, synthetic construct
  misc_feature 1..20: note = gRNA targeting domain
  source 1..20: mol_type = other DNA
tttgaagatactggggttgg

SEQ ID NO: 1231 - DNA, 20 bp, synthetic construct
  misc_feature 1..20: note = gRNA targeting domain
  source 1..20: mol_type = other DNA
aacagggctgaaacatctcc

SEQ ID NO: 1232 - DNA, 20 bp, synthetic construct
  misc_feature 1..20: note = gRNA targeting domain
  source 1..20: mol_type = other DNA
actgttcttgtcaatctcac

SEQ ID NO: 1233 - DNA, 20 bp, synthetic construct
  misc_feature 1..20: note = gRNA targeting domain
  source 1..20: mol_type = other DNA
gaaggtaggctctggtgacc

SEQ ID NO: 1234 - DNA, 20 bp, synthetic construct
  misc_feature 1..20: note = gRNA targeting domain
  source 1..20: mol_type = other DNA
gagtgtgtggaactgctgaa

SEQ ID NO: 1235 - DNA, 20 bp, synthetic construct
  misc_feature 1..20: note = gRNA targeting domain
  source 1..20: mol_type = other DNA
ttagagtatccagtgaggcc

SEQ ID NO: 1236 - DNA, 20 bp, synthetic construct
  misc_feature 1..20: note = gRNA targeting domain
  source 1..20: mol_type = other DNA
tagatattgaggtaagcatt

SEQ ID NO: 1237 - DNA, 20 bp, synthetic construct
  misc_feature 1..20: note = gRNA targeting domain
  source 1..20: mol_type = other DNA
tatacatacatacctgaata

SEQ ID NO: 1238 - DNA, 20 bp, synthetic construct
  misc_feature 1..20: note = gRNA targeting domain
  source 1..20: mol_type = other DNA
atgttctttggcaggtactg

SEQ ID NO: 1239 - DNA, 20 bp, synthetic construct
  misc_feature 1..20: note = gRNA targeting domain
  source 1..20: mol_type = other DNA
aatgctaggttcacttctca

SEQ ID NO: 1240 - DNA, 20 bp, synthetic construct
  misc_feature 1..20: note = gRNA targeting domain
  source 1..20: mol_type = other DNA
aatacttcctaccctgttaa

SEQ ID NO: 1241 - DNA, 20 bp, synthetic construct
  misc_feature 1..20: note = gRNA targeting domain
  source 1..20: mol_type = other DNA
agggtaggaagtatttatgg

SEQ ID NO: 1242 - DNA, 20 bp, synthetic construct
  misc_feature 1..20: note = gRNA targeting domain
  source 1..20: mol_type = other DNA
tgccagaagctctggaattc

SEQ ID NO: 1243 - DNA, 20 bp, synthetic construct
  misc_feature 1..20: note = gRNA targeting domain
  source 1..20: mol_type = other DNA
tatctgctcattgatacaga

SEQ ID NO: 1244 - DNA, 20 bp, synthetic construct
  misc_feature 1..20: note = gRNA targeting domain
  source 1..20: mol_type = other DNA
aatttcgaaggtacatgtgc

SEQ ID NO: 1245 - DNA, 20 bp, synthetic construct
  misc_feature 1..20: note = gRNA targeting domain
  source 1..20: mol_type = other DNA
tcaatagtatgctaaacaag

SEQ ID NO: 1246 - DNA, 20 bp, synthetic construct
  misc_feature 1..20: note = gRNA targeting domain
  source 1..20: mol_type = other DNA
ttcaatagtatgctaaacaa

SEQ ID NO: 1247 - DNA, 20 bp, synthetic construct
  misc_feature 1..20: note = gRNA targeting domain
  source 1..20: mol_type = other DNA
taaatgaatggctacttcat

SEQ ID NO: 1248 - DNA, 20 bp, synthetic construct
  misc_feature 1..20: note = gRNA targeting domain
  source 1..20: mol_type = other DNA
agaaagaagttcctgaaagt

SEQ ID NO: 1249 - DNA, 20 bp, synthetic construct
  misc_feature 1..20: note = gRNA targeting domain
  source 1..20: mol_type = other DNA
aaagttagacagaagggctc

SEQ ID NO: 1250 - DNA, 20 bp, synthetic construct
  misc_feature 1..20: note = gRNA targeting domain
  source 1..20: mol_type = other DNA
tctgaaacacagaggacaag

SEQ ID NO: 1251 - DNA, 20 bp, synthetic construct
  misc_feature 1..20: note = gRNA targeting domain
  source 1..20: mol_type = other DNA
atagcaccttgcactaagta

SEQ ID NO: 1252 - DNA, 20 bp, synthetic construct
  misc_feature 1..20: note = gRNA targeting domain
  source 1..20: mol_type = other DNA
ccttctggtgaggacacagt

SEQ ID NO: 1253 - DNA, 20 bp, synthetic construct
  misc_feature 1..20: note = gRNA targeting domain
  source 1..20: mol_type = other DNA
catttctcttccttctggtg

SEQ ID NO: 1254 - DNA, 20 bp, synthetic construct
  misc_feature 1..20: note = gRNA targeting domain
  source 1..20: mol_type = other DNA
atggagccaattgggagttg

SEQ ID NO: 1255 - DNA, 20 bp, synthetic construct
  misc_feature 1..20: note = gRNA targeting domain
  source 1..20: mol_type = other DNA
gctgacttgtgagcttctgc

SEQ ID NO: 1256 - DNA, 20 bp, synthetic construct
  misc_feature 1..20: note = gRNA targeting domain
  source 1..20: mol_type = other DNA
gtgttgacgcatgcctaaag

SEQ ID NO: 1257 - DNA, 20 bp, synthetic construct
  misc_feature 1..20: note = gRNA targeting domain
  source 1..20: mol_type = other DNA
tagagatcagagcaggaaac

SEQ ID NO: 1258 - DNA, 20 bp, synthetic construct
  misc_feature 1..20: note = gRNA targeting domain
  source 1..20: mol_type = other DNA
gaggtgttagagatcagagc

SEQ ID NO: 1259 - DNA, 20 bp, synthetic construct
  misc_feature 1..20: note = gRNA targeting domain
  source 1..20: mol_type = other DNA
ccttgtgaggctctacaggg

SEQ ID NO: 1260 - DNA, 20 bp, synthetic construct
  misc_feature 1..20: note = gRNA targeting domain
  source 1..20: mol_type = other DNA
tacatgggagttctgcaagt

SEQ ID NO: 1261 - DNA, 20 bp, synthetic construct
  misc_feature 1..20: note = gRNA targeting domain
  source 1..20: mol_type = other DNA
gaataacaaaaataggggaa

SEQ ID NO: 1262 - DNA, 20 bp, synthetic construct
  misc_feature 1..20: note = gRNA targeting domain
  source 1..20: mol_type = other DNA
gacccagtggcaatgtttta

SEQ ID NO: 1263 - DNA, 20 bp, synthetic construct
  misc_feature 1..20: note = gRNA targeting domain
  source 1..20: mol_type = other DNA
agaagtcctggtatcttcta

SEQ ID NO: 1264 - DNA, 20 bp, synthetic construct
  misc_feature 1..20: note = gRNA targeting domain
  source 1..20: mol_type = other DNA
ctcccaccatagaagatacc

SEQ ID NO: 1265 - DNA, 20 bp, synthetic construct
  misc_feature 1..20: note = gRNA targeting domain
  source 1..20: mol_type = other DNA
acgtgtcccatcaaaaatcc

SEQ ID NO: 1266 - DNA, 20 bp, synthetic construct
  misc_feature 1..20: note = gRNA targeting domain
  source 1..20: mol_type = other DNA
aatgagaacttaagagataa

SEQ ID NO: 1267 - DNA, 20 bp, synthetic construct
  misc_feature 1..20: note = gRNA targeting domain
  source 1..20: mol_type = other DNA
taaagcaacagtttcagtgc

SEQ ID NO: 1268 - DNA, 20 bp, synthetic construct
  misc_feature 1..20: note = gRNA targeting domain
  source 1..20: mol_type = other DNA
gataagtagatattgaagta

SEQ ID NO: 1269 - DNA, 20 bp, synthetic construct
  misc_feature 1..20: note = gRNA targeting domain
  source 1..20: mol_type = other DNA
agtgataaatacacatcatc

SEQ ID NO: 1270 - DNA, 20 bp, synthetic construct
  misc_feature 1..20: note = gRNA targeting domain
  source 1..20: mol_type = other DNA
cagtgataaatacacatcat

SEQ ID NO: 1271 - DNA, 20 bp, synthetic construct
  misc_feature 1..20: note = gRNA targeting domain
  source 1..20: mol_type = other DNA
tctgacgtcataatctacca

SEQ ID NO: 1272 - DNA, 20 bp, synthetic construct
  misc_feature 1..20: note = gRNA targeting domain
  source 1..20: mol_type = other DNA
caacctgataggttagggga

SEQ ID NO: 1273 - DNA, 20 bp, synthetic construct
  misc_feature 1..20: note = gRNA targeting domain
  source 1..20: mol_type = other DNA
tatctgctcaaagtgttagg

SEQ ID NO: 1274 - DNA, 20 bp, synthetic construct
  misc_feature 1..20: note = gRNA targeting domain
  source 1..20: mol_type = other DNA
ttagggtctctttaagatag

SEQ ID NO: 1275 - DNA, 20 bp, synthetic construct
  misc_feature 1..20: note = gRNA targeting domain
  source 1..20: mol_type = other DNA
agataggggatctgtgagat

SEQ ID NO: 1276 - DNA, 20 bp, synthetic construct
  misc_feature 1..20: note = gRNA targeting domain
  source 1..20: mol_type = other DNA
gccatatctgagagtctggt

SEQ ID NO: 1277 - DNA, 20 bp, synthetic construct
  misc_feature 1..20: note = gRNA targeting domain
  source 1..20: mol_type = other DNA
tatttggcaatgccttccca

SEQ ID NO: 1278 - DNA, 20 bp, synthetic construct
  misc_feature 1..20: note = gRNA targeting domain
  source 1..20: mol_type = other DNA
gtaaagtggagaatagcagg

SEQ ID NO: 1279 - DNA, 20 bp, synthetic construct
  misc_feature 1..20: note = gRNA targeting domain
  source 1..20: mol_type = other DNA
aaggaaatcagtatatccaa

SEQ ID NO: 1280 - DNA, 20 bp, synthetic construct
  misc_feature 1..20: note = gRNA targeting domain
  source 1..20: mol_type = other DNA
gtgggagatgagaaggaaga

SEQ ID NO: 1281 - DNA, 20 bp, synthetic construct
  misc_feature 1..20: note = gRNA targeting domain
  source 1..20: mol_type = other DNA
acccaataatactggtaaaa

SEQ ID NO: 1282 - DNA, 20 bp, synthetic construct
  misc_feature 1..20: note = gRNA targeting domain
  source 1..20: mol_type = other DNA
ggtacttgcaggacgaaggg

SEQ ID NO: 1283 - DNA, 20 bp, synthetic construct
  misc_feature 1..20: note = gRNA targeting domain
  source 1..20: mol_type = other DNA
gagaatcccctgaaccctgg

SEQ ID NO: 1284 - DNA, 20 bp, synthetic construct
  misc_feature 1..20: note = gRNA targeting domain
  source 1..20: mol_type = other DNA
tctcaaaactactctatttc

SEQ ID NO: 1285 - DNA, 20 bp, synthetic construct
  misc_feature 1..20: note = gRNA targeting domain
  source 1..20: mol_type = other DNA
tagcagttttcttcataaaa

SEQ ID NO: 1286 - DNA, 20 bp, synthetic construct
  misc_feature 1..20: note = gRNA targeting domain
  source 1..20: mol_type = other DNA
catctcacatcagaagagag

SEQ ID NO: 1287 - DNA, 20 bp, synthetic construct
  misc_feature 1..20: note = gRNA targeting domain
  source 1..20: mol_type = other DNA
cagcatcaagacagatactg

SEQ ID NO: 1288 - DNA, 20 bp, synthetic construct
  misc_feature 1..20: note = gRNA targeting domain
  source 1..20: mol_type = other DNA
ggaggatggagggtgaaagg

SEQ ID NO: 1289 - DNA, 20 bp, synthetic construct
  misc_feature 1..20: note = gRNA targeting domain
  source 1..20: mol_type = other DNA
ctatgagcaatacctgagat

SEQ ID NO: 1290 - DNA, 20 bp, synthetic construct
  misc_feature 1..20: note = gRNA targeting domain
  source 1..20: mol_type = other DNA
tttctaaaagatgaacagga

SEQ ID NO: 1291 - DNA, 20 bp, synthetic construct
  misc_feature 1..20: note = gRNA targeting domain
  source 1..20: mol_type = other DNA
agggagagagggaagagagg

SEQ ID NO: 1292 - DNA, 20 bp, synthetic construct
  misc_feature 1..20: note = gRNA targeting domain
  source 1..20: mol_type = other DNA
aagacatggggttgggggca

SEQ ID NO: 1293 - DNA, 20 bp, synthetic construct
  misc_feature 1..20: note = gRNA targeting domain
  source 1..20: mol_type = other DNA
tatgacagagaccctggaag

SEQ ID NO: 1294 - DNA, 20 bp, synthetic construct
  misc_feature 1..20: note = gRNA targeting domain
  source 1..20: mol_type = other DNA
ataaagtggtatgagaggtc

SEQ ID NO: 1295 - DNA, 20 bp, synthetic construct
  misc_feature 1..20: note = gRNA targeting domain
  source 1..20: mol_type = other DNA
tatcagtttaaggacatttt

SEQ ID NO: 1296 - DNA, 20 bp, synthetic construct
  misc_feature 1..20: note = gRNA targeting domain
  source 1..20: mol_type = other DNA
gaatatctagtcccagaagg

SEQ ID NO: 1297 - DNA, 20 bp, synthetic construct
  misc_feature 1..20: note = gRNA targeting domain
  source 1..20: mol_type = other DNA
atagtaaatcctaaagttga

SEQ ID NO: 1298 - DNA, 20 bp, synthetic construct
  misc_feature 1..20: note = gRNA targeting domain
  source 1..20: mol_type = other DNA
tagatacaaccacaaagttg

SEQ ID NO: 1299 - DNA, 20 bp, synthetic construct
  misc_feature 1..20: note = gRNA targeting domain
  source 1..20: mol_type = other DNA
attttatttaggtctgtttc

SEQ ID NO: 1300 - DNA, 20 bp, synthetic construct
  misc_feature 1..20: note = gRNA targeting domain
  source 1..20: mol_type = other DNA
gtcaatatgattaagactaa

SEQ ID NO: 1301 - DNA, 20 bp, synthetic construct
  misc_feature 1..20: note = gRNA targeting domain
  source 1..20: mol_type = other DNA
tttcactgggatcctagcca

SEQ ID NO: 1302 - DNA, 20 bp, synthetic construct
  misc_feature 1..20: note = gRNA targeting domain
  source 1..20: mol_type = other DNA
cctgattttcgctcactacc

SEQ ID NO: 1303 - DNA, 20 bp, synthetic construct
  misc_feature 1..20: note = gRNA targeting domain
  source 1..20: mol_type = other DNA
cattcatatgcaattttaaa

SEQ ID NO: 1304 - DNA, 20 bp, synthetic construct
  misc_feature 1..20: note = gRNA targeting domain
  source 1..20: mol_type = other DNA
ccacatctgtgaggtaaaca

SEQ ID NO: 1305 - DNA, 20 bp, synthetic construct
  misc_feature 1..20: note = gRNA targeting domain
  source 1..20: mol_type = other DNA
ccccgacccagaagcccagc

SEQ ID NO: 1306 - DNA, 20 bp, synthetic construct
  misc_feature 1..20: note = gRNA targeting domain
  source 1..20: mol_type = other DNA
cagggctttcataaactatg

SEQ ID NO: 1307 - DNA, 20 bp, synthetic construct
  misc_feature 1..20: note = gRNA targeting domain
  source 1..20: mol_type = other DNA
tacatggaaaagggcagtta

SEQ ID NO: 1308 - DNA, 20 bp, synthetic construct
  misc_feature 1..20: note = gRNA targeting domain
  source 1..20: mol_type = other DNA
cctacaacatacagggttca

SEQ ID NO: 1309 - DNA, 20 bp, synthetic construct
  misc_feature 1..20: note = gRNA targeting domain
  source 1..20: mol_type = other DNA
gtcttcagcctacaacatac

SEQ ID NO: 1310 - DNA, 20 bp, synthetic construct
  misc_feature 1..20: note = gRNA targeting domain
  source 1..20: mol_type = other DNA
agaaactgcagaggactaac

SEQ ID NO: 1311 - DNA, 20 bp, synthetic construct
  misc_feature 1..20: note = gRNA targeting domain
  source 1..20: mol_type = other DNA
caggacaagggagggaagga

SEQ ID NO: 1312 - DNA, 20 bp, synthetic construct
  misc_feature 1..20: note = gRNA targeting domain
  source 1..20: mol_type = other DNA
aggctctggtgaccaggaca

SEQ ID NO: 1313 - DNA, 20 bp, synthetic construct
  misc_feature 1..20: note = gRNA targeting domain
  source 1..20: mol_type = other DNA
tgaggccaggggccggcggc

SEQ ID NO: 1314 - DNA, 20 bp, synthetic construct
  misc_feature 1..20: note = gRNA targeting domain
  source 1..20: mol_type = other DNA
cctagccagccgccggcccc

SEQ ID NO: 1315 - DNA, 20 bp, synthetic construct
  misc_feature 1..20: note = gRNA targeting domain
  source 1..20: mol_type = other DNA
tagagtatccagtgaggcca

SEQ ID NO: 1316 - DNA, 20 bp, synthetic construct
  misc_feature 1..20: note = gRNA targeting domain
  source 1..20: mol_type = other DNA
ccgccggcccctggcctcac

SEQ ID NO: 1317 - DNA, 20 bp, synthetic construct
  misc_feature 1..20: note = gRNA targeting domain
  source 1..20: mol_type = other DNA
atatttgcattgagatagtg

SEQ ID NO: 1318 - DNA, 20 bp, synthetic construct
  misc_feature 1..20: note = gRNA targeting domain
  source 1..20: mol_type = other DNA
atttgcattgagatagtgtg

SEQ ID NO: 1319 - DNA, 20 bp, synthetic construct
  misc_feature 1..20: note = gRNA targeting domain
  source 1..20: mol_type = other DNA
gtggggaaggggcccccaag

SEQ ID NO: 1320 - DNA, 20 bp, synthetic construct
  misc_feature 1..20: note = gRNA targeting domain
  source 1..20: mol_type = other DNA
aaaaactggaatgactgaat

SEQ ID NO: 1321 - DNA, 20 bp, synthetic construct
  misc_feature 1..20: note = gRNA targeting domain
  source 1..20: mol_type = other DNA
ctcccatcatagaggatacc

SEQ ID NO: 1322 - DNA, 20 bp, synthetic construct
  misc_feature 1..20: note = gRNA targeting domain
  source 1..20: mol_type = other DNA
agatgatgtgtatttaccac

SEQ ID NO: 1323 - DNA, 20 bp, synthetic construct
  misc_feature 1..20: note = gRNA targeting domain
  source 1..20: mol_type = other DNA
tggctgatgacccagggttt

SEQ ID NO: 1324 - DNA, 20 bp, synthetic construct
  misc_feature 1..20: note = gRNA targeting domain
  source 1..20: mol_type = other DNA
ttttcagcctacagcataca

SEQ ID NO: 1325 - DNA, 20 bp, synthetic construct
  misc_feature 1..20: note = gRNA targeting domain
  source 1..20: mol_type = other DNA
gttttcagcctacagcatac

SEQ ID NO: 1326 - DNA, 20 bp, synthetic construct
  misc_feature 1..20: note = gRNA targeting domain
  source 1..20: mol_type = other DNA
ttaagcagcagtatcctctt

SEQ ID NO: 1327 - DNA, 20 bp, synthetic construct
  misc_feature 1..20: note = gRNA targeting domain
  source 1..20: mol_type = other DNA
attaagcagcagtatcctct

SEQ ID NO: 1328 - DNA, 20 bp, synthetic construct
  misc_feature 1..20: note = gRNA targeting domain
  source 1..20: mol_type = other DNA
aaaaattggaatgactgaat

SEQ ID NO: 1329 - RNA, 20 nt, synthetic construct
  misc_feature 1..20: note = gRNA targeting domain
  source 1..20: mol_type = other RNA
gcactgtaacaagctgcacg

SEQ ID NO: 1330 - RNA, 20 nt, synthetic construct
  misc_feature 1..20: note = gRNA targeting domain
  source 1..20: mol_type = other RNA
acaacatacagggttcatgg

SEQ ID NO: 1331 - RNA, 20 nt, synthetic construct
  misc_feature 1..20: note = gRNA targeting domain
  source 1..20: mol_type = other RNA
tgggggtgaagaaactgcag

SEQ ID NO: 1332 - RNA, 20 nt, synthetic construct
  misc_feature 1..20: note = gRNA targeting domain
  source 1..20: mol_type = other RNA
tgagctgtttgaagatactg

SEQ ID NO: 1333 - RNA, 20 nt, synthetic construct
  misc_feature 1..20: note = gRNA targeting domain
  source 1..20: mol_type = other RNA
tgaccaggacaagggaggga

SEQ ID NO: 1334 - RNA, 20 nt, synthetic construct
  misc_feature 1..20: note = gRNA targeting domain
  source 1..20: mol_type = other RNA
ctggtgaccaggacaaggga

SEQ ID NO: 1335 - RNA, 20 nt, synthetic construct
  misc_feature 1..20: note = gRNA targeting domain
  source 1..20: mol_type = other RNA
tctggtgaccaggacaaggg

SEQ ID NO: 1336 - RNA, 20 nt, synthetic construct
  misc_feature 1..20: note = gRNA targeting domain
  source 1..20: mol_type = other RNA
cagcacacacacttatccag

SEQ ID NO: 1337 - RNA, 20 nt, synthetic construct
  misc_feature 1..20: note = gRNA targeting domain
  source 1..20: mol_type = other RNA
tgtgtgctggctgatgaccc

SEQ ID NO: 1338 - RNA, 20 nt, synthetic construct
  misc_feature 1..20: note = gRNA targeting domain
  source 1..20: mol_type = other RNA
gtgtgctggctgatgaccca

SEQ ID NO: 1339 - RNA, 20 nt, synthetic construct
  misc_feature 1..20: note = gRNA targeting domain
  source 1..20: mol_type = other RNA
aagagctacgccaaaaccct

SEQ ID NO: 1340 - RNA, 20 nt, synthetic construct
  misc_feature 1..20: note = gRNA targeting domain
  source 1..20: mol_type = other RNA
gaagagctacgccaaaaccc

SEQ ID NO: 1341 - RNA, 20 nt, synthetic construct
  misc_feature 1..20: note = gRNA targeting domain
  source 1..20: mol_type = other RNA
tctatgctcagtaaagatga

SEQ ID NO: 1342 - RNA, 20 nt, synthetic construct
  misc_feature 1..20: note = gRNA targeting domain
  source 1..20: mol_type = other RNA
acagcatacagggttcatgg

SEQ ID NO: 1343 - RNA, 20 nt, synthetic construct
  misc_feature 1..20: note = gRNA targeting domain
  source 1..20: mol_type = other RNA
tgggagtgaagaaactgcag

SEQ ID NO: 1344 - RNA, 20 nt, synthetic construct
  misc_feature 1..20: note = gRNA targeting domain
  source 1..20: mol_type = other RNA
tatgtgctggctgatgaccc

SEQ ID NO: 1345 - RNA, 20 nt, synthetic construct
  misc_feature 1..20: note = gRNA targeting domain
  source 1..20: mol_type = other RNA
atgtgctggctgatgaccca

SEQ ID NO: 1346 - RNA, 20 nt, synthetic construct
  misc_feature 1..20: note = gRNA targeting domain
  source 1..20: mol_type = other RNA
gaagagctacaccaaaaccc

SEQ ID NO: 1347 - RNA, 20 nt, synthetic construct
  misc_feature 1..20: note = gRNA targeting domain
  source 1..20: mol_type = other RNA
tctatgctcggtaaagatga

SEQ ID NO: 1348 - RNA, 20 nt, synthetic construct
  misc_feature 1..20: note = gRNA targeting domain
  source 1..20: mol_type = other RNA
atagatgagagtagtagagt

SEQ ID NO: 1349 - RNA, 20 nt, synthetic construct
  misc_feature 1..20: note = gRNA targeting domain
  source 1..20: mol_type = other RNA
gtacacgggagttctgcaag

SEQ ID NO: 1350 - RNA, 20 nt, synthetic construct
  misc_feature 1..20: note = gRNA targeting domain
  source 1..20: mol_type = other RNA
tggagctctcagctcactat

SEQ ID NO: 1351 - RNA, 20 nt, synthetic construct
  misc_feature 1..20: note = gRNA targeting domain
  source 1..20: mol_type = other RNA
tagttatctggaggccaggc

SEQ ID NO: 1352 - RNA, 20 nt, synthetic construct
  misc_feature 1..20: note = gRNA targeting domain
  source 1..20: mol_type = other RNA
cttggtgtgtagttatctgg

SEQ ID NO: 1353 - RNA, 20 nt, synthetic construct
  misc_feature 1..20: note = gRNA targeting domain
  source 1..20: mol_type = other RNA
cttgattctgggtggaagct

SEQ ID NO: 1354 - RNA, 20 nt, synthetic construct
  misc_feature 1..20: note = gRNA targeting domain
  source 1..20: mol_type = other RNA
gttaacataggcttgattct

SEQ ID NO: 1355 - RNA, 20 nt, synthetic construct
  misc_feature 1..20: note = gRNA targeting domain
  source 1..20: mol_type = other RNA
gctttgagggaagttaacat

SEQ ID NO: 1356 - RNA, 20 nt, synthetic construct
  misc_feature 1..20: note = gRNA targeting domain
  source 1..20: mol_type = other RNA
aacaattgaaacatttgggc

SEQ ID NO: 1357 - RNA, 20 nt, synthetic construct
  misc_feature 1..20: note = gRNA targeting domain
  source 1..20: mol_type = other RNA
tttcaattgttcctcacccc

SEQ ID NO: 1358 - RNA, 20 nt, synthetic construct
  misc_feature 1..20: note = gRNA targeting domain
  source 1..20: mol_type = other RNA
tgggggcaaagtatgtccag

SEQ ID NO: 1359 - RNA, 20 nt, synthetic construct
  misc_feature 1..20: note = gRNA targeting domain
  source 1..20: mol_type = other RNA
atgggggcaaagtatgtcca

SEQ ID NO: 1360 - RNA, 20 nt, synthetic construct
  misc_feature 1..20: note = gRNA targeting domain
  source 1..20: mol_type = other RNA
tatatgtgtccagctgatat

SEQ ID NO: 1361 - RNA, 20 nt, synthetic construct
  misc_feature 1..20: note = gRNA targeting domain
  source 1..20: mol_type = other RNA
tggccaaacatacattgcta

SEQ ID NO: 1362 - RNA, 20 nt, synthetic construct
  misc_feature 1..20: note = gRNA targeting domain
  source 1..20: mol_type = other RNA
atattggctcagtcaaagtg

SEQ ID NO: 1363 - RNA, 20 nt, synthetic construct
  misc_feature 1..20: note = gRNA targeting domain
  source 1..20: mol_type = other RNA
tatggtcgttaaaaagatgc

SEQ ID NO: 1364 - RNA, 20 nt, synthetic construct
  misc_feature 1..20: note = gRNA targeting domain
  source 1..20: mol_type = other RNA
atctggaggcaggacaagta

SEQ ID NO: 1365 - RNA, 20 nt, synthetic construct
  misc_feature 1..20: note = gRNA targeting domain
  source 1..20: mol_type = other RNA
gttttaaaacatctatctgg

SEQ ID NO: 1366 - RNA, 20 nt, synthetic construct
  misc_feature 1..20: note = gRNA targeting domain
  source 1..20: mol_type = other RNA
agaaaagagaggtggaaatg

SEQ ID NO: 1367 - RNA, 20 nt, synthetic construct
  misc_feature 1..20: note = gRNA targeting domain
  source 1..20: mol_type = other RNA
tgactttgagaaaagagagg

SEQ ID NO: 1368 - RNA, 20 nt, synthetic construct
  misc_feature 1..20: note = gRNA targeting domain
  source 1..20: mol_type = other RNA
ctaactgggctgagacccag

SEQ ID NO: 1369 - RNA, 20 nt, synthetic construct
  misc_feature 1..20: note = gRNA targeting domain
  source 1..20: mol_type = other RNA
tgtttgaagatactggggtt

SEQ ID NO: 1370 - RNA, 20 nt, synthetic construct
  misc_feature 1..20: note = gRNA targeting domain
  source 1..20: mol_type = other RNA
ctgtttgaagatactggggt

SEQ ID NO: 1371 - RNA, 20 nt, synthetic construct
  misc_feature 1..20: note = gRNA targeting domain
  source 1..20: mol_type = other RNA
gtgagctgtttgaagatact

SEQ ID NO: 1372 - RNA, 20 nt, synthetic construct
  misc_feature 1..20: note = gRNA targeting domain
  source 1..20: mol_type = other RNA
tgtgagctgtttgaagatac

SEQ ID NO: 1373 - RNA, 20 nt, synthetic construct
  misc_feature 1..20: note = gRNA targeting domain
  source 1..20: mol_type = other RNA
gtattgatctgagcacagca

SEQ ID NO: 1374 - RNA, 20 nt, synthetic construct
  misc_feature 1..20: note = gRNA targeting domain
  source 1..20: mol_type = other RNA
agaacagtttgacagtcaga

SEQ ID NO: 1375 - RNA, 20 nt, synthetic construct
  misc_feature 1..20: note = gRNA targeting domain
  source 1..20: mol_type = other RNA
ggctctggtgaccaggacaa

SEQ ID NO: 1376 - RNA, 20 nt, synthetic construct
  misc_feature 1..20: note = gRNA targeting domain
  source 1..20: mol_type = other RNA
ctattactgcgctgaaactg

SEQ ID NO: 1377 - RNA, 20 nt, synthetic construct
  misc_feature 1..20: note = gRNA targeting domain
  source 1..20: mol_type = other RNA
gtacggataagtagatattg

SEQ ID NO: 1378 - RNA, 20 nt, synthetic construct
  misc_feature 1..20: note = gRNA targeting domain
  source 1..20: mol_type = other RNA
agggcatgtggaaaactctg

SEQ ID NO: 1379 - RNA, 20 nt, synthetic construct
  misc_feature 1..20: note = gRNA targeting domain
  source 1..20: mol_type = other RNA
aagtcagccacctgcaaccc

SEQ ID NO: 1380 - RNA, 20 nt, synthetic construct
  misc_feature 1..20: note = gRNA targeting domain
  source 1..20: mol_type = other RNA
aacagtgctgaaacatctcc

SEQ ID NO: 1381 - RNA, 20 nt, synthetic construct
  misc_feature 1..20: note = gRNA targeting domain
  source 1..20: mol_type = other RNA
acagacaagaaggtgaaaaa

SEQ ID NO: 1382 - RNA, 20 nt, synthetic construct
  misc_feature 1..20: note = gRNA targeting domain
  source 1..20: mol_type = other RNA
tagtctcatttagtaagcat

SEQ ID NO: 1383 - RNA, 20 nt, synthetic construct
  misc_feature 1..20: note = gRNA targeting domain
  source 1..20: mol_type = other RNA
aagagctacaccaaaaccct

SEQ ID NO: 1384 - RNA, 20 nt, synthetic construct
  misc_feature 1..20: note = gRNA targeting domain
  source 1..20: mol_type = other RNA
agcagatataagccttacac

SEQ ID NO: 1385 - RNA, 20 nt, synthetic construct
  misc_feature 1..20: note = gRNA targeting domain
  source 1..20: mol_type = other RNA
gtagaatttggctgtttatc

SEQ ID NO: 1386 - RNA, 20 nt, synthetic construct
  misc_feature 1..20: note = gRNA targeting domain
  source 1..20: mol_type = other RNA
ccccagtggagactctgtga

SEQ ID NO: 1387 - RNA, 20 nt, synthetic construct
  misc_feature 1..20: note = gRNA targeting domain
  source 1..20: mol_type = other RNA
gttactgggaaaaaagctga

SEQ ID NO: 1388 - RNA, 20 nt, synthetic construct
  misc_feature 1..20: note = gRNA targeting domain
  source 1..20: mol_type = other RNA
ttgaggaactgacatttccc

SEQ ID NO: 1389 - RNA, 20 nt, synthetic construct
  misc_feature 1..20: note = gRNA targeting domain
  source 1..20: mol_type = other RNA
caagaaaagagagaactcgt

SEQ ID NO: 1390 - RNA, 20 nt, synthetic construct
  misc_feature 1..20: note = gRNA targeting domain
  source 1..20: mol_type = other RNA
ctctgttcaagcaagaggat

SEQ ID NO: 1391 - RNA, 20 nt, synthetic construct
  misc_feature 1..20: note = gRNA targeting domain
  source 1..20: mol_type = other RNA
accataaaaggaacaaccag

SEQ ID NO: 1392 - RNA, 20 nt, synthetic construct
  misc_feature 1..20: note = gRNA targeting domain
  source 1..20: mol_type = other RNA
catttctgaaggctgactcg

SEQ ID NO: 1393 - RNA, 20 nt, synthetic construct
  misc_feature 1..20: note = gRNA targeting domain
  source 1..20: mol_type = other RNA
tgtaagactctgggggaggt

SEQ ID NO: 1394 - RNA, 20 nt, synthetic construct
  misc_feature 1..20: note = gRNA targeting domain
  source 1..20: mol_type = other RNA
acctcattgtaagactctgg

SEQ ID NO: 1395 - RNA, 20 nt, synthetic construct
  misc_feature 1..20: note = gRNA targeting domain
  source 1..20: mol_type = other RNA
gagacctcattgtaagactc

SEQ ID NO: 1396 - RNA, 20 nt, synthetic construct
  misc_feature 1..20: note = gRNA targeting domain
  source 1..20: mol_type = other RNA
tcccccagagtcttacaatg

SEQ ID NO: 1397 - RNA, 20 nt, synthetic construct
  misc_feature 1..20: note = gRNA targeting domain
  source 1..20: mol_type = other RNA
ctgcaatcaatccagccccc

SEQ ID NO: 1398 - RNA, 20 nt, synthetic construct
  misc_feature 1..20: note = gRNA targeting domain
  source 1..20: mol_type = other RNA
aaggttcagtgaagacctgg

SEQ ID NO: 1399 - RNA, 20 nt, synthetic construct
  misc_feature 1..20: note = gRNA targeting domain
  source 1..20: mol_type = other RNA
tggtgtaggagaaatccggt

SEQ ID NO: 1400 - RNA, 20 nt, synthetic construct
  misc_feature 1..20: note = gRNA targeting domain
  source 1..20: mol_type = other RNA
cagtaaagacacttgtacac

SEQ ID NO: 1401 - RNA, 20 nt, synthetic construct
  misc_feature 1..20: note = gRNA targeting domain
  source 1..20: mol_type = other RNA
ctggagctctcagctcacta

SEQ ID NO: 1402 - RNA, 20 nt, synthetic construct
  misc_feature 1..20: note = gRNA targeting domain
  source 1..20: mol_type = other RNA
aacataggcttgattctggg

SEQ ID NO: 1403 - RNA, 20 nt, synthetic construct
  misc_feature 1..20: note = gRNA targeting domain
  source 1..20: mol_type = other RNA
actacctgcatttaatggga

SEQ ID NO: 1404 - RNA, 20 nt, synthetic construct
  misc_feature 1..20: note = gRNA targeting domain
  source 1..20: mol_type = other RNA
ccagtgactagtgcttgaag

SEQ ID NO: 1405 - RNA, 20 nt, synthetic construct
  misc_feature 1..20: note = gRNA targeting domain
  source 1..20: mol_type = other RNA
gatgggggcaaagtatgtcc

SEQ ID NO: 1406 - RNA, 20 nt, synthetic construct
  misc_feature 1..20: note = gRNA targeting domain
  source 1..20: mol_type = other RNA
tatcctttaattccagatgg

SEQ ID NO: 1407 - RNA, 20 nt, synthetic construct
  misc_feature 1..20: note = gRNA targeting domain
  source 1..20: mol_type = other RNA
atatcctttaattccagatg

SEQ ID NO: 1408 - RNA, 20 nt, synthetic construct
  misc_feature 1..20: note = gRNA targeting domain
  source 1..20: mol_type = other RNA
aaggctattcctatatcagc

SEQ ID NO: 1409 - RNA, 20 nt, synthetic construct
  misc_feature 1..20: note = gRNA targeting domain
  source 1..20: mol_type = other RNA
tagccttagcaatgtatgtt

SEQ ID NO: 1410 - RNA, 20 nt, synthetic construct
  misc_feature 1..20: note = gRNA targeting domain
  source 1..20: mol_type = other RNA
tcagtcaaagtggggaactt

SEQ ID NO: 1411 - RNA, 20 nt, synthetic construct
  misc_feature 1..20: note = gRNA targeting domain
  source 1..20: mol_type = other RNA
tatattggctcagtcaaagt

SEQ ID NO: 1412 - RNA, 20 nt, synthetic construct
  misc_feature 1..20: note = gRNA targeting domain
  source 1..20: mol_type = other RNA
gtttgaagatactggggttg

SEQ ID NO: 1413 - RNA, 20 nt, synthetic construct
  misc_feature 1..20: note = gRNA targeting domain
  source 1..20: mol_type = other RNA
gagaacttcaaggtgagtcc

SEQ ID NO: 1414 - RNA, 20 nt, synthetic construct
  misc_feature 1..20: note = gRNA targeting domain
  source 1..20: mol_type = other RNA
cttccttccctcccttgtcc

SEQ ID NO: 1415 - RNA, 20 nt, synthetic construct
  misc_feature 1..20: note = gRNA targeting domain
  source 1..20: mol_type = other RNA
aaccctgggaaggtaggctc

SEQ ID NO: 1416 - RNA, 20 nt, synthetic construct
  misc_feature 1..20: note = gRNA targeting domain
  source 1..20: mol_type = other RNA
agagacaagaaggtaaaaaa

SEQ ID NO: 1417 - RNA, 20 nt, synthetic construct
  misc_feature 1..20: note = gRNA targeting domain
  source 1..20: mol_type = other RNA
cactggagctagagacaaga

SEQ ID NO: 1418 - RNA, 20 nt, synthetic construct
  misc_feature 1..20: note = gRNA targeting domain
  source 1..20: mol_type = other RNA
tcttgtctctagctccagtg

SEQ ID NO: 1419 - RNA, 20 nt, synthetic construct
  misc_feature 1..20: note = gRNA targeting domain
  source 1..20: mol_type = other RNA
ctttaaactacaggcctcac

SEQ ID NO: 1420 - RNA, 20 nt, synthetic construct
  misc_feature 1..20: note = gRNA targeting domain
  source 1..20: mol_type = other RNA
gtgaaatgtgttttaggcat

SEQ ID NO: 1421 - RNA, 20 nt, synthetic construct
  misc_feature 1..20: note = gRNA targeting domain
  source 1..20: mol_type = other RNA
agtggtaaatacacatcatc

SEQ ID NO: 1422 - RNA, 20 nt, synthetic construct
  misc_feature 1..20: note = gRNA targeting domain
  source 1..20: mol_type = other RNA
catggaaaacaactctaaag

SEQ ID NO: 1423 - RNA, 20 nt, synthetic construct
  misc_feature 1..20: note = gRNA targeting domain
  source 1..20: mol_type = other RNA
aaacaactctaaagaggcaa

SEQ ID NO: 1424 - RNA, 20 nt, synthetic construct
  misc_feature 1..20: note = gRNA targeting domain
  source 1..20: mol_type = other RNA
gacatattggaccattaaca

SEQ ID NO: 1425 - RNA, 20 nt, synthetic construct
  misc_feature 1..20: note = gRNA targeting domain
  source 1..20: mol_type = other RNA
tattggaccattaacagggt

SEQ ID NO: 1426 - RNA, 20 nt, synthetic construct
  misc_feature 1..20: note = gRNA targeting domain
  source 1..20: mol_type = other RNA
ctggaattctggcttatcgg

SEQ ID NO: 1427 - RNA, 20 nt, synthetic construct
  misc_feature 1..20: note = gRNA targeting domain
  source 1..20: mol_type = other RNA
cataggcagagtagacgcaa

SEQ ID NO: 1428 - RNA, 20 nt, synthetic construct
  misc_feature 1..20: note = gRNA targeting domain
  source 1..20: mol_type = other RNA
tgtgaaatggtagtgagtga

SEQ ID NO: 1429 - RNA, 20 nt, synthetic construct
  misc_feature 1..20: note = gRNA targeting domain
  source 1..20: mol_type = other RNA
gtgagtgatggcatttgaag

SEQ ID NO: 1430 - RNA, 20 nt, synthetic construct
  misc_feature 1..20: note = gRNA targeting domain
  source 1..20: mol_type = other RNA
acagatgagagtagtagagt

SEQ ID NO: 1431 - RNA, 20 nt, synthetic construct
  misc_feature 1..20: note = gRNA targeting domain
  source 1..20: mol_type = other RNA
tccttctggtgaggacacag

SEQ ID NO: 1432 - RNA, 20 nt, synthetic construct
  misc_feature 1..20: note = gRNA targeting domain
  source 1..20: mol_type = other RNA
cccactgtgtcctcaccaga

SEQ ID NO: 1433 - RNA, 20 nt, synthetic construct
  misc_feature 1..20: note = gRNA targeting domain
  source 1..20: mol_type = other RNA
aggaaaataattctatgatg

SEQ ID NO: 1434 - RNA, 20 nt, synthetic construct
  misc_feature 1..20: note = gRNA targeting domain
  source 1..20: mol_type = other RNA
tgtaagcttctagggaggtg

SEQ ID NO: 1435 - RNA, 20 nt, synthetic construct
  misc_feature 1..20: note = gRNA targeting domain
  source 1..20: mol_type = other RNA
ctcattgtaagcttctaggg

SEQ ID NO: 1436 - RNA, 20 nt, synthetic construct
  misc_feature 1..20: note = gRNA targeting domain
  source 1..20: mol_type = other RNA
ctccctagaagcttacaatg

SEQ ID NO: 1437 - RNA, 20 nt, synthetic construct
  misc_feature 1..20: note = gRNA targeting domain
  source 1..20: mol_type = other RNA
ctggtcacagcatttcaagg

SEQ ID NO: 1438 - RNA, 20 nt, synthetic construct
  misc_feature 1..20: note = gRNA targeting domain
  source 1..20: mol_type = other RNA
tcacttcattgtagttaccg

SEQ ID NO: 1439 - RNA, 20 nt, synthetic construct
  misc_feature 1..20: note = gRNA targeting domain
  source 1..20: mol_type = other RNA
aggggcaatactatttccaa

SEQ ID NO: 1440 - RNA, 20 nt, synthetic construct
  misc_feature 1..20: note = gRNA targeting domain
  source 1..20: mol_type = other RNA
tgaggagtcctgtcctatag

SEQ ID NO: 1441 - RNA, 20 nt, synthetic construct
  misc_feature 1..20: note = gRNA targeting domain
  source 1..20: mol_type = other RNA
gtacatgggagttctgcaag

SEQ ID NO: 1442 - RNA, 20 nt, synthetic construct
  misc_feature 1..20: note = gRNA targeting domain
  source 1..20: mol_type = other RNA
cctacagcatacagggttca

SEQ ID NO: 1443 - RNA, 20 nt, synthetic construct
  misc_feature 1..20: note = gRNA targeting domain
  source 1..20: mol_type = other RNA
ccatgaaccctgtatgctgt

SEQ ID NO: 1444 - RNA, 20 nt, synthetic construct
  misc_feature 1..20: note = gRNA targeting domain
  source 1..20: mol_type = other RNA
ttgtccatctagattttcag

SEQ ID NO: 1445 - RNA, 20 nt, synthetic construct
  misc_feature 1..20: note = gRNA targeting domain
  source 1..20: mol_type = other RNA
tcttgtctgtagctccagtg

SEQ ID NO: 1446 - RNA, 20 nt, synthetic construct
  misc_feature 1..20: note = gRNA targeting domain
  source 1..20: mol_type = other RNA
ttatattcaggtatgtatgt

SEQ ID NO: 1447 - RNA, 20 nt, synthetic construct
  misc_feature 1..20: note = gRNA targeting domain
  source 1..20: mol_type = other RNA
catggaaaacaactcttaag

SEQ ID NO: 1448 - RNA, 20 nt, synthetic construct
  misc_feature 1..20: note = gRNA targeting domain
  source 1..20: mol_type = other RNA
gacatattggccacttaaca

SEQ ID NO: 1449 - RNA, 20 nt, synthetic construct
  misc_feature 1..20: note = gRNA targeting domain
  source 1..20: mol_type = other RNA
acttctctcaatctaaggat

SEQ ID NO: 1450 - RNA, 20 nt, synthetic construct
  misc_feature 1..20: note = gRNA targeting domain
  source 1..20: mol_type = other RNA
ccatatctgagagtctggtt

SEQ ID NO: 1451 - RNA, 20 nt, synthetic construct
  misc_feature 1..20: note = gRNA targeting domain
  source 1..20: mol_type = other RNA
ccccatttatccaaaaacca

SEQ ID NO: 1452 - RNA, 20 nt, synthetic construct
  misc_feature 1..20: note = gRNA targeting domain
  source 1..20: mol_type = other RNA
gccacctccattggagcagg

SEQ ID NO: 1453 - RNA, 20 nt, synthetic construct
  misc_feature 1..20: note = gRNA targeting domain
  source 1..20: mol_type = other RNA
gtgaacccttttagctctcc

SEQ ID NO: 1454 - RNA, 20 nt, synthetic construct
  misc_feature 1..20: note = gRNA targeting domain
  source 1..20: mol_type = other RNA
catctaacataagaaggaag

SEQ ID NO: 1455 - RNA, 20 nt, synthetic construct
  misc_feature 1..20: note = gRNA targeting domain
  source 1..20: mol_type = other RNA
ggcaagccaaatgcagaaac

SEQ ID NO: 1456 - RNA, 20 nt, synthetic construct
  misc_feature 1..20: note = gRNA targeting domain
  source 1..20: mol_type = other RNA
tgtcttctgcctaattgccc

SEQ ID NO: 1457 - RNA, 20 nt, synthetic construct
  misc_feature 1..20: note = gRNA targeting domain
  source 1..20: mol_type = other RNA
aactgattcctgtgctctta

SEQ ID NO: 1458 - RNA, 20 nt, synthetic construct
  misc_feature 1..20: note = gRNA targeting domain
  source 1..20: mol_type = other RNA
attttctgaaagtcattttg

SEQ ID NO: 1459 - RNA, 20 nt, synthetic construct
  misc_feature 1..20: note = gRNA targeting domain
  source 1..20: mol_type = other RNA
agcacggtaacatgctgtac

SEQ ID NO: 1460 - RNA, 20 nt, synthetic construct
  misc_feature 1..20: note = gRNA targeting domain
  source 1..20: mol_type = other RNA
atggcacagagctgggtgga

SEQ ID NO: 1461 - RNA, 20 nt, synthetic construct
  misc_feature 1..20: note = gRNA targeting domain
  source 1..20: mol_type = other RNA
gttaaactagtaaagcatgg

SEQ ID NO: 1462 - RNA, 20 nt, synthetic construct
  misc_feature 1..20: note = gRNA targeting domain
  source 1..20: mol_type = other RNA
taaatatctgaatataggag

SEQ ID NO: 1463 - RNA, 20 nt, synthetic construct
  misc_feature 1..20: note = gRNA targeting domain
  source 1..20: mol_type = other RNA
agagggtgggaaaagggtga

SEQ ID NO: 1464 - RNA, 20 nt, synthetic construct
  misc_feature 1..20: note = gRNA targeting domain
  source 1..20: mol_type = other RNA
gggacctagctgaaatcagc

SEQ ID NO: 1465 - RNA, 20 nt, synthetic construct
  misc_feature 1..20: note = gRNA targeting domain
  source 1..20: mol_type = other RNA
tagagcattaaatatttcag

SEQ ID NO: 1466 - RNA, 20 nt, synthetic construct
  misc_feature 1..20: note = gRNA targeting domain
  source 1..20: mol_type = other RNA
aaccaaccctaaatctctat

SEQ ID NO: 1467 - RNA, 20 nt, synthetic construct
  misc_feature 1..20: note = gRNA targeting domain
  source 1..20: mol_type = other RNA
cccctctaatgtgaagtctt

SEQ ID NO: 1468 - RNA, 20 nt, synthetic construct
  misc_feature 1..20: note = gRNA targeting domain
  source 1..20: mol_type = other RNA
atttattagcatgagtacta

SEQ ID NO: 1469 - RNA, 20 nt, synthetic construct
  misc_feature 1..20: note = gRNA targeting domain
  source 1..20: mol_type = other RNA
gagactagaaagaatcttga

SEQ ID NO: 1470 - RNA, 20 nt, synthetic construct
  misc_feature 1..20: note = gRNA targeting domain
  source 1..20: mol_type = other RNA
acggaggtgggtggatcatg

SEQ ID NO: 1471 - RNA, 20 nt, synthetic construct
  misc_feature 1..20: note = gRNA targeting domain
  source 1..20: mol_type = other RNA
acaagtgtacacataggatg

SEQ ID NO: 1472 - RNA, 20 nt, synthetic construct
  misc_feature 1..20: note = gRNA targeting domain
  source 1..20: mol_type = other RNA
gttgcattgggaagagacta

SEQ ID NO: 1473 - RNA, 20 nt, synthetic construct
  misc_feature 1..20: note = gRNA targeting domain
  source 1..20: mol_type = other RNA
cttctgctggaaccgggtca

SEQ ID NO: 1474 - RNA, 20 nt, synthetic construct
  misc_feature 1..20: note = gRNA targeting domain
  source 1..20: mol_type = other RNA
ctctgtgtcatctccttcca

SEQ ID NO: 1475 - RNA, 20 nt, synthetic construct
  misc_feature 1..20: note = gRNA targeting domain
  source 1..20: mol_type = other RNA
aaggtcttgaaaccatagtg

SEQ ID NO: 1476 - RNA, 20 nt, synthetic construct
  misc_feature 1..20: note = gRNA targeting domain
  source 1..20: mol_type = other RNA
aggttgcctaaaagatagcc

SEQ ID NO: 1477 - RNA, 20 nt, synthetic construct
  misc_feature 1..20: note = gRNA targeting domain
  source 1..20: mol_type = other RNA
catataaaatctaaaaaata

SEQ ID NO: 1478 - RNA, 20 nt, synthetic construct
  misc_feature 1..20: note = gRNA targeting domain
  source 1..20: mol_type = other RNA
ccagctttgttttacagcaa

SEQ ID NO: 1479 - RNA, 20 nt, synthetic construct
  misc_feature 1..20: note = gRNA targeting domain
  source 1..20: mol_type = other RNA
aaagatgtaatagaagaggc

SEQ ID NO: 1480 - RNA, 20 nt, synthetic construct
  misc_feature 1..20: note = gRNA targeting domain
  source 1..20: mol_type = other RNA
aagatactgtatcttaggag

SEQ ID NO: 1481 - RNA, 20 nt, synthetic construct
  misc_feature 1..20: note = gRNA targeting domain
  source 1..20: mol_type = other RNA
gaattctctagaggtgacaa

SEQ ID NO: 1482 - RNA, 20 nt, synthetic construct
  misc_feature 1..20: note = gRNA targeting domain
  source 1..20: mol_type = other RNA
ttgattattaaatatatata

SEQ ID NO: 1483 - RNA, 20 nt, synthetic construct
  misc_feature 1..20: note = gRNA targeting domain
  source 1..20: mol_type = other RNA
tgtagtcccagtaacccagg

SEQ ID NO: 1484 - RNA, 20 nt, synthetic construct
  misc_feature 1..20: note = gRNA targeting domain
  source 1..20: mol_type = other RNA
tcatctcacagggaagtgcc

SEQ ID NO: 1485 - RNA, 20 nt, synthetic construct
  misc_feature 1..20: note = gRNA targeting domain
  source 1..20: mol_type = other RNA
gaaaagagtaaacagtcaaa

SEQ ID NO: 1486 - RNA, 20 nt, synthetic construct
  misc_feature 1..20: note = gRNA targeting domain
  source 1..20: mol_type = other RNA
aatgggacttccatttgggg

SEQ ID NO: 1487 - RNA, 20 nt, synthetic construct
  misc_feature 1..20: note = gRNA targeting domain
  source 1..20: mol_type = other RNA
actatcaatggggtaatcag

SEQ ID NO: 1488 - RNA, 20 nt, synthetic construct
  misc_feature 1..20: note = gRNA targeting domain
  source 1..20: mol_type = other RNA
gtcaaataggaggttaactg

SEQ ID NO: 1489 - RNA, 20 nt, synthetic construct
  misc_feature 1..20: note = gRNA targeting domain
  source 1..20: mol_type = other RNA
taatctgcaagagtgtctgg

SEQ ID NO: 1490 - RNA, 20 nt, synthetic construct
  misc_feature 1..20: note = gRNA targeting domain
  source 1..20: mol_type = other RNA
agtacagggggatgggagaa

SEQ ID NO: 1491 - RNA, 20 nt, synthetic construct
  misc_feature 1..20: note = gRNA targeting domain
  source 1..20: mol_type = other RNA
agggtctcagtgttccctaa

SEQ ID NO: 1492 - RNA, 20 nt, synthetic construct
  misc_feature 1..20: note = gRNA targeting domain
  source 1..20: mol_type = other RNA
agagacagcgagagagacag

SEQ ID NO: 1493 - RNA, 20 nt, synthetic construct
  misc_feature 1..20: note = gRNA targeting domain
  source 1..20: mol_type = other RNA
acatgtaggcattaattcag

SEQ ID NO: 1494 - RNA, 20 nt, synthetic construct
  misc_feature 1..20: note = gRNA targeting domain
  source 1..20: mol_type = other RNA
aacaaagaaacactgtgcga

SEQ ID NO: 1495 - RNA, 20 nt, synthetic construct
  misc_feature 1..20: note = gRNA targeting domain
  source 1..20: mol_type = other RNA
aggaaaaataaataatggag

SEQ ID NO: 1496 - RNA, 20 nt, synthetic construct
  misc_feature 1..20: note = gRNA targeting domain
  source 1..20: mol_type = other RNA
tttatttgtatatagaaaga

SEQ ID NO: 1497 - RNA, 20 nt, synthetic construct
  misc_feature 1..20: note = gRNA targeting domain
  source 1..20: mol_type = other RNA
cttgctgttggtttcagagc

SEQ ID NO: 1498 - RNA, 20 nt, synthetic construct
  misc_feature 1..20: note = gRNA targeting domain
  source 1..20: mol_type = other RNA
tgaaacaaaaaggaaaaggt

SEQ ID NO: 1499 - RNA, 20 nt, synthetic construct
  misc_feature 1..20: note = gRNA targeting domain
  source 1..20: mol_type = other RNA
attagaattgtggagagcac

SEQ ID NO: 1500 - RNA, 20 nt, synthetic construct
  misc_feature 1..20: note = gRNA targeting domain
  source 1..20: mol_type = other RNA
atacagagaacactgaggga

SEQ ID NO: 1501 - RNA, 20 nt, synthetic construct
  misc_feature 1..20: note = gRNA targeting domain
  source 1..20: mol_type = other RNA
tacatgcgactgaaagggtg

SEQ ID NO: 1502 - RNA, 20 nt, synthetic construct
  misc_feature 1..20: note = gRNA targeting domain
  source 1..20: mol_type = other RNA
gagccagaactgtctaatgg

SEQ ID NO: 1503 - RNA, 20 nt, synthetic construct
  misc_feature 1..20: note = gRNA targeting domain
  source 1..20: mol_type = other RNA
agagagccagaactgtctaa

SEQ ID NO: 1504 - RNA, 20 nt, synthetic construct
  misc_feature 1..20: note = gRNA targeting domain
  source 1..20: mol_type = other RNA
tacatgctgttcatttactc

SEQ ID NO: 1505 - RNA, 20 nt, synthetic construct
  misc_feature 1..20: note = gRNA targeting domain
  source 1..20: mol_type = other RNA
gagtgacattcagaagggca

SEQ ID NO: 1506 - RNA, 20 nt, synthetic construct
  misc_feature 1..20: note = gRNA targeting domain
  source 1..20: mol_type = other RNA
cctcaccatatctcttgagt

SEQ ID NO: 1507 - RNA, 20 nt, synthetic construct
  misc_feature 1..20: note = gRNA targeting domain
  source 1..20: mol_type = other RNA
ttctaaaacctctttctttg

SEQ ID NO: 1508 - RNA, 20 nt, synthetic construct
  misc_feature 1..20: note = gRNA targeting domain
  source 1..20: mol_type = other RNA
aaatatgtttcaggtcacag

SEQ ID NO: 1509 - RNA, 20 nt, synthetic construct
  misc_feature 1..20: note = gRNA targeting domain
  source 1..20: mol_type = other RNA
tcaatggaggtactctttgg

SEQ ID NO: 1510 - RNA, 20 nt, synthetic construct
  misc_feature 1..20: note = gRNA targeting domain
  source 1..20: mol_type = other RNA
ggtaaaatcctcgctgaagt

SEQ ID NO: 1511 - RNA, 20 nt, synthetic construct
  misc_feature 1..20: note = gRNA targeting domain
  source 1..20: mol_type = other RNA
agtaggataatagtacttca

SEQ ID NO: 1512 - RNA, 20 nt, synthetic construct
  misc_feature 1..20: note = gRNA targeting domain
  source 1..20: mol_type = other RNA
atgtatgtatgtgatgactg

SEQ ID NO: 1513 - RNA, 20 nt, synthetic construct
  misc_feature 1..20: note = gRNA targeting domain
  source 1..20: mol_type = other RNA
ggtacttttgaaagcagagg

SEQ ID NO: 1514 - RNA, 20 nt, synthetic construct
  misc_feature 1..20: note = gRNA targeting domain
  source 1..20: mol_type = other RNA
atgggtacttttgaaagcag

SEQ ID NO: 1515 - RNA, 20 nt, synthetic construct
  misc_feature 1..20: note = gRNA targeting domain
  source 1..20: mol_type = other RNA
caaagtacctctaggtccat

SEQ ID NO: 1516 - RNA, 20 nt, synthetic construct
  misc_feature 1..20: note = gRNA targeting domain
  source 1..20: mol_type = other RNA
gtagacaaccaggagactgt

SEQ ID NO: 1517 - RNA, 20 nt, synthetic construct
  misc_feature 1..20: note = gRNA targeting domain
  source 1..20: mol_type = other RNA
agtcagactatgtaagacaa

SEQ ID NO: 1518 - RNA, 20 nt, synthetic construct
  misc_feature 1..20: note = gRNA targeting domain
  source 1..20: mol_type = other RNA
gtcagactatgtaagacaac

SEQ ID NO: 1519 - RNA, 20 nt, synthetic construct
  misc_feature 1..20: note = gRNA targeting domain
  source 1..20: mol_type = other RNA
ggttaaggtgagaaggctgg

SEQ ID NO: 1520 - RNA, 20 nt, synthetic construct
  misc_feature 1..20: note = gRNA targeting domain
  source 1..20: mol_type = other RNA
gaagcaaggttaaggtgaga

SEQ ID NO: 1521 - RNA, 20 nt, synthetic construct
  misc_feature 1..20: note = gRNA targeting domain
  source 1..20: mol_type = other RNA
cacacatgaagcagcaatgc

SEQ ID NO: 1522 - RNA, 20 nt, synthetic construct
  misc_feature 1..20: note = gRNA targeting domain
  source 1..20: mol_type = other RNA
tgaatctattggtcaagggt

SEQ ID NO: 1523 - RNA, 20 nt, synthetic construct
  misc_feature 1..20: note = gRNA targeting domain
  source 1..20: mol_type = other RNA
gtgtaggaaaatggagggga

SEQ ID NO: 1524 - RNA, 20 nt, synthetic construct
  misc_feature 1..20: note = gRNA targeting domain
  source 1..20: mol_type = other RNA
cttcactgacaatattccac

SEQ ID NO: 1525 - RNA, 20 nt, synthetic construct
  misc_feature 1..20: note = gRNA targeting domain
  source 1..20: mol_type = other RNA
agtctccttgaaatacacat

SEQ ID NO: 1526 - RNA, 20 nt, synthetic construct
  misc_feature 1..20: note = gRNA targeting domain
  source 1..20: mol_type = other RNA
ggttggctgatggaaagatg

SEQ ID NO: 1527 - RNA, 20 nt, synthetic construct
  misc_feature 1..20: note = gRNA targeting domain
  source 1..20: mol_type = other RNA
cacagtagaagcaataatca

SEQ ID NO: 1528 - RNA, 20 nt, synthetic construct
  misc_feature 1..20: note = gRNA targeting domain
  source 1..20: mol_type = other RNA
actattcatgatataaacac

SEQ ID NO: 1529 - RNA, 20 nt, synthetic construct
  misc_feature 1..20: note = gRNA targeting domain
  source 1..20: mol_type = other RNA
agaaagtgcatattctgaaa

SEQ ID NO: 1530 - RNA, 20 nt, synthetic construct
  misc_feature 1..20: note = gRNA targeting domain
  source 1..20: mol_type = other RNA
atggagccaggcagagatgt

SEQ ID NO: 1531 - RNA, 20 nt, synthetic construct
  misc_feature 1..20: note = gRNA targeting domain
  source 1..20: mol_type = other RNA
ttgcaaacctgagataaaca

SEQ ID NO: 1532 - RNA, 20 nt, synthetic construct
  misc_feature 1..20: note = gRNA targeting domain
  source 1..20: mol_type = other RNA
aagtccgccatctgcaatcc

SEQ ID NO: 1533 - RNA, 20 nt, synthetic construct
  misc_feature 1..20: note = gRNA targeting domain
  source 1..20: mol_type = other RNA
tcccaactgaccttatctgt

SEQ ID NO: 1534 - RNA, 20 nt, synthetic construct
  misc_feature 1..20: note = gRNA targeting domain
  source 1..20: mol_type = other RNA
ctcccaactgaccttatctg

SEQ ID NO: 1535 - RNA, 20 nt, synthetic construct
  misc_feature 1..20: note = gRNA targeting domain
  source 1..20: mol_type = other RNA
ataaggtcagttgggagttg

SEQ ID NO: 1536 - RNA, 20 nt, synthetic construct
  misc_feature 1..20: note = gRNA targeting domain
  source 1..20: mol_type = other RNA
tgtaagaaatgaatcagcag

SEQ ID NO: 1537 - RNA, 20 nt, synthetic construct
  misc_feature 1..20: note = gRNA targeting domain
  source 1..20: mol_type = other RNA
gattggtcacagcatttcaa

SEQ ID NO: 1538 - RNA, 20 nt, synthetic construct
  misc_feature 1..20: note = gRNA targeting domain
  source 1..20: mol_type = other RNA
gtgaccaatctgcacacttg

SEQ ID NO: 1539 - RNA, 20 nt, synthetic construct
  misc_feature 1..20: note = gRNA targeting domain
  source 1..20: mol_type = other RNA
atctgcacacttgagggcat

SEQ ID NO: 1540 - RNA, 20 nt, synthetic construct
  misc_feature 1..20: note = gRNA targeting domain
  source 1..20: mol_type = other RNA
actttcttaggcatccacaa

SEQ ID NO: 1541 - RNA, 20 nt, synthetic construct
  misc_feature 1..20: note = gRNA targeting domain
  source 1..20: mol_type = other RNA
ttgcagctgagtagcaagga

SEQ ID NO: 1542 - RNA, 20 nt, synthetic construct
  misc_feature 1..20: note = gRNA targeting domain
  source 1..20: mol_type = other RNA
aaaggttcagtgaagacctg

SEQ ID NO: 1543 - RNA, 20 nt, synthetic construct
  misc_feature 1..20: note = gRNA targeting domain
  source 1..20: mol_type = other RNA
gaaaaggttcagtgaagacc

SEQ ID NO: 1544 - RNA, 20 nt, synthetic construct
  misc_feature 1..20: note = gRNA targeting domain
  source 1..20: mol_type = other RNA
gtgggaagaaagacctctat

SEQ ID NO: 1545 - RNA, 20 nt, synthetic construct
  misc_feature 1..20: note = gRNA targeting domain
  source 1..20: mol_type = other RNA
atggtgtaggagaaatccgg

SEQ ID NO: 1546 - RNA, 20 nt, synthetic construct
  misc_feature 1..20: note = gRNA targeting domain
  source 1..20: mol_type = other RNA
cacacaccacaaacacaaac

SEQ ID NO: 1547 - RNA, 20 nt, synthetic construct
  misc_feature 1..20: note = gRNA targeting domain
  source 1..20: mol_type = other RNA
agttaacataggcttgattc

SEQ ID NO: 1548 - RNA, 20 nt, synthetic construct
  misc_feature 1..20: note = gRNA targeting domain
  source 1..20: mol_type = other RNA
taatgggaaggcaaaatctc

SEQ ID NO: 1549 - RNA, 20 nt, synthetic construct
  misc_feature 1..20: note = gRNA targeting domain
  source 1..20: mol_type = other RNA
ccccttcaagcactagtcac

SEQ ID NO: 1550 - RNA, 20 nt, synthetic construct
  misc_feature 1..20: note = gRNA targeting domain
  source 1..20: mol_type = other RNA
agatagcaagatttaaatta

SEQ ID NO: 1551 - RNA, 20 nt, synthetic construct
  misc_feature 1..20: note = gRNA targeting domain
  source 1..20: mol_type = other RNA
tcttcagcctacaacataca

SEQ ID NO: 1552 - RNA, 20 nt, synthetic construct
  misc_feature 1..20: note = gRNA targeting domain
  source 1..20: mol_type = other RNA
gcaaagtatgtccaggggtg

SEQ ID NO: 1553 - RNA, 20 nt, synthetic construct
  misc_feature 1..20: note = gRNA targeting domain
  source 1..20: mol_type = other RNA
tatatcctttaattccagat

SEQ ID NO: 1554 - RNA, 20 nt, synthetic construct
  misc_feature 1..20: note = gRNA targeting domain
  source 1..20: mol_type = other RNA
tgcaggcagaaggcatatat

SEQ ID NO: 1555 - RNA, 20 nt, synthetic construct
  misc_feature 1..20: note = gRNA targeting domain
  source 1..20: mol_type = other RNA
gttaaaaagatgcaggcaga

SEQ ID NO: 1556 - RNA, 20 nt, synthetic construct
  misc_feature 1..20: note = gRNA targeting domain
  source 1..20: mol_type = other RNA
gaaactgcagaggactaact

SEQ ID NO: 1557 - RNA, 20 nt, synthetic construct
  misc_feature 1..20: note = gRNA targeting domain
  source 1..20: mol_type = other RNA
tttgaagatactggggttgg

SEQ ID NO: 1558 - RNA, 20 nt, synthetic construct
  misc_feature 1..20: note = gRNA targeting domain
  source 1..20: mol_type = other RNA
aacagggctgaaacatctcc

SEQ ID NO: 1559 - RNA, 20 nt, synthetic construct
  misc_feature 1..20: note = gRNA targeting domain
  source 1..20: mol_type = other RNA
actgttcttgtcaatctcac

SEQ ID NO: 1560 - RNA, 20 nt, synthetic construct
  misc_feature 1..20: note = gRNA targeting domain
  source 1..20: mol_type = other RNA
gaaggtaggctctggtgacc

SEQ ID NO: 1561 - RNA, 20 nt, synthetic construct
  misc_feature 1..20: note = gRNA targeting domain
  source 1..20: mol_type = other RNA
tagatattgaggtaagcatt

SEQ ID NO: 1562 - RNA, 20 nt, synthetic construct
  misc_feature 1..20: note = gRNA targeting domain
  source 1..20: mol_type = other RNA
tatacatacatacctgaata

SEQ ID NO: 1563 - RNA, 20 nt, synthetic construct
  misc_feature 1..20: note = gRNA targeting domain
  source 1..20: mol_type = other RNA
atgttctttggcaggtactg

SEQ ID NO: 1564 - RNA, 20 nt, synthetic construct
  misc_feature 1..20: note = gRNA targeting domain
  source 1..20: mol_type = other RNA
aatgctaggttcacttctca

SEQ ID NO: 1565 - RNA, 20 nt, synthetic construct
  misc_feature 1..20: note = gRNA targeting domain
  source 1..20: mol_type = other RNA
aatacttcctaccctgttaa

SEQ ID NO: 1566 - RNA, 20 nt, synthetic construct
  misc_feature 1..20: note = gRNA targeting domain
  source 1..20: mol_type = other RNA
agggtaggaagtatttatgg

SEQ ID NO: 1567 - RNA, 20 nt, synthetic construct
  misc_feature 1..20: note = gRNA targeting domain
  source 1..20: mol_type = other RNA
tgccagaagctctggaattc

SEQ ID NO: 1568 - RNA, 20 nt, synthetic construct
  misc_feature 1..20: note = gRNA targeting domain
  source 1..20: mol_type = other RNA
tatctgctcattgatacaga

SEQ ID NO: 1569 - RNA, 20 nt, synthetic construct
  misc_feature 1..20: note = gRNA targeting domain
  source 1..20: mol_type = other RNA
aatttcgaaggtacatgtgc

SEQ ID NO: 1570 - RNA, 20 nt, synthetic construct
  misc_feature 1..20: note = gRNA targeting domain
  source 1..20: mol_type = other RNA
tcaatagtatgctaaacaag

SEQ ID NO: 1571 - RNA, 20 nt, synthetic construct
  misc_feature 1..20: note = gRNA targeting domain
  source 1..20: mol_type = other RNA
ttcaatagtatgctaaacaa

SEQ ID NO: 1572 - RNA, 20 nt, synthetic construct
  misc_feature 1..20: note = gRNA targeting domain
  source 1..20: mol_type = other RNA
taaatgaatggctacttcat

SEQ ID NO: 1573 - RNA, 20 nt, synthetic construct
  misc_feature 1..20: note = gRNA targeting domain
  source 1..20: mol_type = other RNA
agaaagaagttcctgaaagt

SEQ ID NO: 1574 - RNA, 20 nt, synthetic construct
  misc_feature 1..20: note = gRNA targeting domain
  source 1..20: mol_type = other RNA
aaagttagacagaagggctc

SEQ ID NO: 1575 - RNA, 20 nt, synthetic construct
  misc_feature 1..20: note = gRNA targeting domain
  source 1..20: mol_type = other RNA
tctgaaacacagaggacaag

SEQ ID NO: 1576 - RNA, 20 nt, synthetic construct
  misc_feature 1..20: note = gRNA targeting domain
  source 1..20: mol_type = other RNA
atagcaccttgcactaagta

SEQ ID NO: 1577 - RNA, 20 nt, synthetic construct
  misc_feature 1..20: note = gRNA targeting domain
  source 1..20: mol_type = other RNA
ccttctggtgaggacacagt

SEQ ID NO: 1578 - RNA, 20 nt, synthetic construct
  misc_feature 1..20: note = gRNA targeting domain
  source 1..20: mol_type = other RNA
catttctcttccttctggtg

SEQ ID NO: 1579 - RNA, 20 nt, synthetic construct
  misc_feature 1..20: note = gRNA targeting domain
  source 1..20: mol_type = other RNA
atggagccaattgggagttg

SEQ ID NO: 1580 - RNA, 20 nt, synthetic construct
  misc_feature 1..20: note = gRNA targeting domain
  source 1..20: mol_type = other RNA
gctgacttgtgagcttctgc

SEQ ID NO: 1581 - RNA, 20 nt, synthetic construct
  misc_feature 1..20: note = gRNA targeting domain
  source 1..20: mol_type = other RNA
gtgttgacgcatgcctaaag

SEQ ID NO: 1582 - RNA, 20 nt, synthetic construct
  misc_feature 1..20: note = gRNA targeting domain
  source 1..20: mol_type = other RNA
tagagatcagagcaggaaac

SEQ ID NO: 1583 - RNA, 20 nt, synthetic construct
  misc_feature 1..20: note = gRNA targeting domain
  source 1..20: mol_type = other RNA
gaggtgttagagatcagagc

SEQ ID NO: 1584 - RNA, 20 nt, synthetic construct
  misc_feature 1..20: note = gRNA targeting domain
  source 1..20: mol_type = other RNA
ccttgtgaggctctacaggg

SEQ ID NO: 1585 - RNA, 20 nt, synthetic construct
  misc_feature 1..20: note = gRNA targeting domain
  source 1..20: mol_type = other RNA
tacatgggagttctgcaagt

SEQ ID NO: 1586 - RNA, 20 nt, synthetic construct
  misc_feature 1..20: note = gRNA targeting domain
  source 1..20: mol_type = other RNA
gaataacaaaaataggggaa

SEQ ID NO: 1587 - RNA, 20 nt, synthetic construct
  misc_feature 1..20: note = gRNA targeting domain
  source 1..20: mol_type = other RNA
gacccagtggcaatgtttta

SEQ ID NO: 1588 - RNA, 20 nt, synthetic construct
  misc_feature 1..20: note = gRNA targeting domain
  source 1..20: mol_type = other RNA
acgtgtcccatcaaaaatcc

SEQ ID NO: 1589 - RNA, 20 nt, synthetic construct
  misc_feature 1..20: note = gRNA targeting domain
  source 1..20: mol_type = other RNA
aatgagaacttaagagataa

SEQ ID NO: 1590 - RNA, 20 nt, synthetic construct
  misc_feature 1..20: note = gRNA targeting domain
  source 1..20: mol_type = other RNA
taaagcaacagtttcagtgc

SEQ ID NO: 1591 - RNA, 20 nt, synthetic construct
  misc_feature 1..20: note = gRNA targeting domain
  source 1..20: mol_type = other RNA
gataagtagatattgaagta

SEQ ID NO: 1592 - RNA, 20 nt, synthetic construct
  misc_feature 1..20: note = gRNA targeting domain
  source 1..20: mol_type = other RNA
agtgataaatacacatcatc

SEQ ID NO: 1593 - RNA, 20 nt, synthetic construct
  misc_feature 1..20: note = gRNA targeting domain
  source 1..20: mol_type = other RNA
cagtgataaatacacatcat

SEQ ID NO: 1594 - RNA, 20 nt, synthetic construct
  misc_feature 1..20: note = gRNA targeting domain
  source 1..20: mol_type = other RNA
tctgacgtcataatctacca

SEQ ID NO: 1595 - RNA, 20 nt, synthetic construct
  misc_feature 1..20: note = gRNA targeting domain
  source 1..20: mol_type = other RNA
caacctgataggttagggga

SEQ ID NO: 1596 - RNA, 20 nt, synthetic construct
  misc_feature 1..20: note = gRNA targeting domain
  source 1..20: mol_type = other RNA
tatctgctcaaagtgttagg

SEQ ID NO: 1597 - RNA, 20 nt, synthetic construct
  misc_feature 1..20: note = gRNA targeting domain
  source 1..20: mol_type = other RNA
ttagggtctctttaagatag

SEQ ID NO: 1598 - RNA, 20 nt, synthetic construct
  misc_feature 1..20: note = gRNA targeting domain
  source 1..20: mol_type = other RNA
agataggggatctgtgagat

SEQ ID NO: 1599 - RNA, 20 nt, synthetic construct
  misc_feature 1..20: note = gRNA targeting domain
  source 1..20: mol_type = other RNA
gccatatctgagagtctggt

SEQ ID NO: 1600 - RNA, 20 nt, synthetic construct
  misc_feature 1..20: note = gRNA targeting domain
  source 1..20: mol_type = other RNA
tatttggcaatgccttccca

SEQ ID NO: 1601 - RNA, 20 nt, synthetic construct
  misc_feature 1..20: note = gRNA targeting domain
  source 1..20: mol_type = other RNA
gtaaagtggagaatagcagg

SEQ ID NO: 1602 - RNA, 20 nt, synthetic construct
  misc_feature 1..20: note = gRNA targeting domain
  source 1..20: mol_type = other RNA
aaggaaatcagtatatccaa

SEQ ID NO: 1603 - RNA, 20 nt, synthetic construct
  misc_feature 1..20: note = gRNA targeting domain
  source 1..20: mol_type = other RNA
gtgggagatgagaaggaaga

SEQ ID NO: 1604 - RNA, 20 nt, synthetic construct
  misc_feature 1..20: note = gRNA targeting domain
  source 1..20: mol_type = other RNA
acccaataatactggtaaaa

SEQ ID NO: 1605 - RNA, 20 nt, synthetic construct
  misc_feature 1..20: note = gRNA targeting domain
  source 1..20: mol_type = other RNA
ggtacttgcaggacgaaggg

SEQ ID NO: 1606 - RNA, 20 nt, synthetic construct
  misc_feature 1..20: note = gRNA targeting domain
  source 1..20: mol_type = other RNA
gagaatcccctgaaccctgg

SEQ ID NO: 1607 - RNA, 20 nt, synthetic construct
  misc_feature 1..20: note = gRNA targeting domain
  source 1..20: mol_type = other RNA
tctcaaaactactctatttc

SEQ ID NO: 1608 - RNA, 20 nt, synthetic construct
  misc_feature 1..20: note = gRNA targeting domain
  source 1..20: mol_type = other RNA
tagcagttttcttcataaaa

SEQ ID NO: 1609 - RNA, 20 nt, synthetic construct
  misc_feature 1..20: note = gRNA targeting domain
  source 1..20: mol_type = other RNA
catctcacatcagaagagag

SEQ ID NO: 1610 - RNA, 20 nt, synthetic construct
  misc_feature 1..20: note = gRNA targeting domain
  source 1..20: mol_type = other RNA
cagcatcaagacagatactg

SEQ ID NO: 1611 - RNA, 20 nt, synthetic construct
  misc_feature 1..20: note = gRNA targeting domain
  source 1..20: mol_type = other RNA
ggaggatggagggtgaaagg

SEQ ID NO: 1612 - RNA, 20 nt, synthetic construct
  misc_feature 1..20: note = gRNA targeting domain
  source 1..20: mol_type = other RNA
ctatgagcaatacctgagat

SEQ ID NO: 1613 - RNA, 20 nt, synthetic construct
  misc_feature 1..20: note = gRNA targeting domain
  source 1..20: mol_type = other RNA
tttctaaaagatgaacagga

SEQ ID NO: 1614 - RNA, 20 nt, synthetic construct
  misc_feature 1..20: note = gRNA targeting domain
  source 1..20: mol_type = other RNA
agggagagagggaagagagg

SEQ ID NO: 1615 - RNA, 20 nt, synthetic construct
  misc_feature 1..20: note = gRNA targeting domain
  source 1..20: mol_type = other RNA
aagacatggggttgggggca

SEQ ID NO: 1616 - RNA, 20 nt, synthetic construct
  misc_feature 1..20: note = gRNA targeting domain
  source 1..20: mol_type = other RNA
tatgacagagaccctggaag

SEQ ID NO: 1617 - RNA, 20 nt, synthetic construct
  misc_feature 1..20: note = gRNA targeting domain
  source 1..20: mol_type = other RNA
ataaagtggtatgagaggtc

SEQ ID NO: 1618 - RNA, 20 nt, synthetic construct
  misc_feature 1..20: note = gRNA targeting domain
  source 1..20: mol_type = other RNA
tatcagtttaaggacatttt

SEQ ID NO: 1619 - RNA, 20 nt, synthetic construct
  misc_feature 1..20: note = gRNA targeting domain
  source 1..20: mol_type = other RNA
gaatatctagtcccagaagg

SEQ ID NO: 1620 - RNA, 20 nt, synthetic construct
  misc_feature 1..20: note = gRNA targeting domain
  source 1..20: mol_type = other RNA
atagtaaatcctaaagttga

SEQ ID NO: 1621 - RNA, 20 nt, synthetic construct
  misc_feature 1..20: note = gRNA targeting domain
  source 1..20: mol_type = other RNA
tagatacaaccacaaagttg

SEQ ID NO: 1622 - RNA, 20 nt, synthetic construct
  misc_feature 1..20: note = gRNA targeting domain
  source 1..20: mol_type = other RNA
attttatttaggtctgtttc

SEQ ID NO: 1623 - RNA, 20 nt, synthetic construct
  misc_feature 1..20: note = gRNA targeting domain
  source 1..20: mol_type = other RNA
gtcaatatgattaagactaa

SEQ ID NO: 1624 - RNA, 20 nt, synthetic construct
  misc_feature 1..20: note = gRNA targeting domain
  source 1..20: mol_type = other RNA
tttcactgggatcctagcca

SEQ ID NO: 1625 - RNA, 20 nt, synthetic construct
  misc_feature 1..20: note = gRNA targeting domain
  source 1..20: mol_type = other RNA
cctgattttcgctcactacc

SEQ ID NO: 1626 - RNA, 20 nt, synthetic construct
  misc_feature 1..20: note = gRNA targeting domain
  source 1..20: mol_type = other RNA
cattcatatgcaattttaaa

SEQ ID NO: 1627 - RNA, 20 nt, synthetic construct
  misc_feature 1..20: note = gRNA targeting domain
  source 1..20: mol_type = other RNA
ccacatctgtgaggtaaaca

SEQ ID NO: 1628 - RNA, 20 nt, synthetic construct
  misc_feature 1..20: note = gRNA targeting domain
  source 1..20: mol_type = other RNA
ccccgacccagaagcccagc

SEQ ID NO: 1629 - RNA, 20 nt, synthetic construct
  misc_feature 1..20: note = gRNA targeting domain
  source 1..20: mol_type = other RNA
cagggctttcataaactatg

SEQ ID NO: 1630 - RNA, 20 nt, synthetic construct
  misc_feature 1..20: note = gRNA targeting domain
  source 1..20: mol_type = other RNA
tacatggaaaagggcagtta

SEQ ID NO: 1631 - RNA, 20 nt, synthetic construct
  misc_feature 1..20: note = gRNA targeting domain
  source 1..20: mol_type = other RNA
cctacaacatacagggttca

SEQ ID NO: 1632 - RNA, 20 nt, synthetic construct
  misc_feature 1..20: note = gRNA targeting domain
  source 1..20: mol_type = other RNA
gtcttcagcctacaacatac

SEQ ID NO: 1633 - RNA, 20 nt, synthetic construct
  misc_feature 1..20: note = gRNA targeting domain
  source 1..20: mol_type = other RNA
agaaactgcagaggactaac

SEQ ID NO: 1634 - RNA, 20 nt, synthetic construct
  misc_feature 1..20: note = gRNA targeting domain
  source 1..20: mol_type = other RNA
caggacaagggagggaagga

SEQ ID NO: 1635 - RNA, 20 nt, synthetic construct
  misc_feature 1..20: note = gRNA targeting domain
  source 1..20: mol_type = other RNA
aggctctggtgaccaggaca

SEQ ID NO: 1636 - RNA, 20 nt, synthetic construct
  misc_feature 1..20: note = gRNA targeting domain
  source 1..20: mol_type = other RNA
agatgatgtgtatttaccac

SEQ ID NO: 1637 - RNA, 20 nt, synthetic construct
  misc_feature 1..20: note = gRNA targeting domain
  source 1..20: mol_type = other RNA
tggctgatgacccagggttt

SEQ ID NO: 1638 - RNA, 20 nt, synthetic construct
  misc_feature 1..20: note = gRNA targeting domain
  source 1..20: mol_type = other RNA
ttttcagcctacagcataca

SEQ ID NO: 1639 - RNA, 20 nt, synthetic construct
  misc_feature 1..20: note = gRNA targeting domain
  source 1..20: mol_type = other RNA
gttttcagcctacagcatac

SEQ ID NO: 1640 - DNA, 304 bp, Homo sapiens
  source 1..304: mol_type = other DNA
tcctaaagcttggaacactttcccttccttaagaaccatccttgctactcagctgcaatcaatccagcccccaggtcttcactgaaccttttcccatctcttccaaaacatctgtttctgagaagtcctgtcctatagaggtctttcttcccaccggatttctcctacaccatttactcccacttgcagaactcccgtgtacaagtgtctttactgcttttatttgctcatcaaaatgcacatctcatataaaaataaatgaggagcatgcacacaccacaaacacaaacaggcatgcagaaat

SEQ ID NO: 1641 - DNA, 665 bp, Homo sapiens
  source 1..665: mol_type = other DNA
ataaagatgaacccatagtgagctgagagctccagcctggcctccagataactacacaccaagcttccacccagaatcaagcctatgttaacttccctcaaagcctgagattttgccttcccattaaatgcaggtagttgttccccttcaagcactagtcactggccataatttaaatcttgctatcttcttgccaccatgaaccctgtatgttgtaggctgaagacgttaaaagaaacacacgctgacacacacacacacacgcgcgcgcgcacacacacacacacacacagagctgactttcaaaatctactccagcccaaatgtttcaattgttcctcacccctggacatactttgcccccatctggaattaaaggatataagtttgtaatgaagcattagcagcattttatatgtgtccagctgatataggaatagccttagcaatgtatgtttggccaccaaagttccccactttgactgagccaatatatgccttctgcctgcatctttttaacgaccatacttgtcctgcctccagatagatgttttaaaacaacaaaaatgagggaaagatgaaagttctttctactggaatctaataaagaaaagtcattttcctcatttccacctctcttttctcaaagtcaaaattgtccatct

SEQ ID NO: 1642 - DNA, 165 bp, Homo sapiens
  source 1..165: mol_type = other DNA
ccctaaaacattaccactgggtctcagcccagttagtcctctgcagtttcttcacccccaaccccagtatcttcaaacagctcacaccctgctgtgctcagatcaatactccgttgtctaagttgcctcgagactaaaggcaacagggctgaaacatctcctgga

SEQ ID NO: 1643 - DNA, 122 bp, Homo sapiens
  source 1..122: mol_type = other DNA
ctgtgagattgacaagaacagtttgacagtcagaaggtgccacaaatcctgagaagcgacctggacttttgccaggcacagggtccttccttccctcccttgtcctggtcaccagagcctac

SEQ ID NO: 1644 - DNA, 24 bp, Homo sapiens
  source 1..24: mol_type = other DNA
gccgccggcccctggcctcactgg

SEQ ID NO: 1645 - DNA, 33 bp, Homo sapiens
  source 1..33: mol_type = other DNA
ccttgtcaaggctattggtcaaggcaaggctgg

SEQ ID NO: 1646 - DNA, 36 bp, Homo sapiens
  source 1..36: mol_type = other DNA
tgagatagtgtggggaaggggcccccaagaggatac

SEQ ID NO: 1647 - DNA, 41 bp, Homo sapiens
  source 1..41: mol_type = other DNA
tatagcctttgccttgttccgattcagtcattccagttttt

SEQ ID NO: 1648 - DNA, 114 bp, Homo sapiens
  source 1..114: mol_type = other DNA
tcttccctttagctagtttccttctcccatcatagaggataccaggacttcttttgtcagccgttttttaccttcttgtctctagctccagtgaggcctgtagtttaaagctaa

SEQ ID NO: 1649 - DNA, 86 bp, Homo sapiens
  source 1..86: mol_type = other DNA
ccacagtttcagcgcagtaatagattagtgttacataatataagacctaatgcttacctcaatatctacttatccgtacctatttg

SEQ ID NO: 1650 - DNA, 142 bp, Homo sapiens
  source 1..142: mol_type = other DNA
tattcaggtatgtatgtatacaccagatgatgtgtatttaccactggataagtgtgtgtgctggctgatgacccagggttttggcgtagctcttctatgctcagtaaagatgatggtagaatgttctttggcaggtactgtg

SEQ ID NO: 1651 - DNA, 697 bp, Homo sapiens
  source 1..697: mol_type = other DNA
caataaagatgaacccatagtgagctgagagctccagcctggcctccagataactacacaccaagcttccacccagaatcaagcctatgttaacttccctcaaagcctgagattttgctttcccattaaatgcaggtagttgttcttcttgcagcactagtcactggccataatttaaatcttgttatcttcttgccaccatgaaccctgtatgctgtaggctgaaaacgttaaaagaaacacacgctctcacacacacacaaacacacgcgcgcacacacacacacacacacacagagctgactttcaaaatctactccagcccaaatgtttcaattgttcctcacccctggacatactttgcccccatctggaattaaaggatataagtttgtaatgaagcattagcagcattttatatgtgtccagctgatataggaatagccttagcaatgtatgtttggccaccaaagttccccactttgactgagccaatatatgccttctgcctgcatctttttaatgaccatacttgtcctgcctccagatagatgttttaaaacgaataacaaaaataggggaaaggtgaaagttctttctaccgaaatctaataaagaaaagtcattttcctcatttccacctctcttttctcaaagtcaaagttgtccatctagattttcagaggcactccttagg

SEQ ID NO: 1652 - DNA, 185 bp, Homo sapiens
  source 1..185: mol_type = other DNA
ccctaaaacattgccactgggtctcagcccagttagtcctctgcagtttcttcactcccaaccccagtatcttcaaacagctcacaccctgctgtgctcagatcaatactcagttgtctaagttgcctcgagactaaaggcaacagtgctgaaacatctcctggactcaccttgaagttctcagg

SEQ ID NO: 1653 - DNA, 137 bp, Homo sapiens
  source 1..137: mol_type = other DNA
agcctgtgagattgacaagaacagtttgacagtcagaaggtgccacaaatcctgagaagcgacctggacttttgccaggcacagggtccttccttccctcccttgtcctggtcaccagagcctaccttcccagggtt

SEQ ID NO: 1654 - DNA, 38 bp, Homo sapiens
  source 1..38: mol_type = other DNA
ccgccggcccctggcctcactggatactctaagactat

SEQ ID NO: 1655 - DNA, 31 bp, Homo sapiens
  source 1..31: mol_type = other DNA
ccttgtcaaggctattggtcaaggcaaggct

SEQ ID NO: 1656 - DNA, 75 bp, Homo sapiens
  source 1..75: mol_type = other DNA
cagggaccgtttcagacagatatttgcattgagatagtgtggggaaggggcccccaagaggatactgctgcttaa

SEQ ID NO: 1657 - DNA, 29 bp, Homo sapiens
  source 1..29: mol_type = other DNA
ttgccttgttccgattcagtcattccaat

SEQ ID NO: 1658 - DNA, 104 bp, Homo sapiens
  source 1..104: mol_type = other DNA
tttagctagttttcttctcccaccatagaagataccaggacttcttttgtcagccgtttttcaccttcttgtctgtagctccagtgaggcctgtagtttaaagt

SEQ ID NO: 1659 - DNA, 38 bp, Homo sapiens
  source 1..38: mol_type = other DNA
ggacacgtcttagtctcatttagtaagcattggtttcc

SEQ ID NO: 1660 - DNA, 124 bp, Homo sapiens
  source 1..124: mol_type = other DNA
ttttttatattcaggtatgtatgtaggcacccgatgatgtgtatttatcactggataagtgtatgtgctggctgatgacccagggttttggtgtagctcttctatgctcggtaaagatgatggt

SEQ ID NO: 1661 - DNA, 268 bp, synthetic construct
  misc_feature 1..268: note = Portion of lentiviral vector encoding unique gRNA targeting sequence
  misc_feature 110..129: note = 20-mer gRNA targeting sequence
  source 1..268: mol_type = other DNA
aatgatacggcgaccaccgagatctacactctttccctacacgacgctcttccgatcttacgatcgatggtccagagctttatatatcttgtggaaaggacgaaacaccnnnnnnnnnnnnnnnnnnnngttttagagctagaaatagcaagttaaaataaggctagtccgttatcaacttgaaaaagtggcaccgagtcggagatcggaagagcacacgtctgaactccagtcaccaaggcgaatctcgtatgccgtcttctgcttg

1-43. (canceled)

44. A synthetic guide RNA (gRNA) comprising a targeting domain complementary to a sequence located within one or more regions selected from the group consisting of Chr 11 (NC_000011.10): 5,249,198-5,249,362 (Region 3); 5,249,591-5,249,712 (Region 4); 5,250,464-5,250,549 (Region 10); 5,250,594-5,250,735 (Region 11); 5,253,425-5,254,121 (Region 12); 5,254,122-5,254,306 (Region 13); 5,254,511-5,254,648 (Region 14); 5,255,255-5,255,292 (Region 20); and 5,255,518-5,255,641 (Region 21).

45. The synthetic gRNA of claim 44 comprising:
(a) the targeting domain differing by no more than 3 nucleotides from a sequence selected from the group consisting of SEQ ID NOs: 1331-44, 1346-47, 1350-77, 1380, 1382-83, 1401-02, 1405-15, 1421, 1442-44, 1446, 1547, 1552-54, 1556-63, 1586, 1592-93, 1633-39; or
(b) the targeting domain consisting of positions 5-20 of a sequence selected from the group consisting of SEQ ID NOs: 1331-44, 1346-47, 1350-77, 1380, 1382-83, 1401-02, 1405-15, 1421, 1442-44, 1446, 1547, 1552-54, 1556-63, 1586, 1592-93, 1633-39.

46. The synthetic gRNA of claim 45, further comprising
(a) the targeting domain differing by no more than 3 nucleotides from a Tier 1 or Tier 2 targeting domain sequence selected from the group consisting of SEQ ID NOs: 1331-47, 1350-62, 1364-77, 1380, 1382-83, 1402, 1414, and 1446; or
(b) the targeting domain consisting of positions 5-20 of a Tier 1 or Tier 2 targeting domain sequence selected from the group consisting of SEQ ID NOs: 1331-47, 1350-62, 1364-77, 1380, 1382-83, 1402, 1414, and 1446.

47. The synthetic gRNA of claim 46, wherein the targeting domain comprises a Tier 1 or Tier 2 gRNA selected from the group consisting of SEQ ID NOs: 1331-47, 1350-62, 1364-77, 1380, 1382-83, 1402, 1414, and 1446.

48. The synthetic gRNA of claim 47, wherein the gRNA comprises one or more 2-o-methyl modifications, one or more phosphorothioate modifications, or a combination thereof.

49. A genome editing system, comprising:
an RNA-guided nuclease; and
at least one guide RNA (gRNA) comprising a targeting domain complementary to a sequence within one or more regions selected from the group consisting of Chr 11 (NC_000011.10): 5,249,198-5,249,362 (Region 3); 5,249,591-5,249,712 (Region 4); 5,250,464-5,250,549 (Region 10); 5,250,594-5,250,735 (Region 11); 5,253,425-5,254,121 (Region 12); 5,254,122-5,254,306 (Region 13); 5,254,511-5,254,648 (Region 14); 5,255,255-5,255,292 (Region 20); and 5,255,518-5,255,641 (Region 21).

50. The genome editing system of claim 49, wherein the at least one gRNA comprises:
(a) the targeting domain differing by no more than 3 nucleotides from a sequence selected from the group consisting of SEQ ID NOs: 1331-44, 1346-47, 1350-77, 1380, 1382-83, 1401-02, 1405-15, 1421, 1442-44, 1446, 1547, 1552-54, 1556-63, 1586, 1592-93, 1633-39; or
(b) the targeting domain consisting of positions 5-20 of a sequence selected from the group consisting of SEQ ID NOs: 1331-44, 1346-47, 1350-77, 1380, 1382-83, 1401-02, 1405-15, 1421, 1442-44, 1446, 1547, 1552-54, 1556-63, 1586, 1592-93, 1633-39.

51. The genome editing system of claim 50, further comprising
(a) the targeting domain differing by no more than 3 nucleotides from a Tier 1 or Tier 2 targeting domain sequence selected from the group consisting of SEQ ID NOs: 1331-47, 1350-62, 1364-77, 1380, 1382-83, 1402, 1414, and 1446; or
(b) the targeting domain consisting of positions 5-20 of a Tier 1 or Tier 2 targeting domain sequence selected from the group consisting of SEQ ID NOs: 1331-47, 1350-62, 1364-77, 1380, 1382-83, 1402, 1414, and 1446.

52. The genome editing system of claim 49, wherein the targeting domain comprises a Tier 1 or Tier 2 targeting domain sequence selected from the group consisting of SEQ ID NOs: 1331-47, 1350-62, 1364-77, 1380, 1382-83, 1402, 1414, and 1446.

53. The genome editing system of claim 49, wherein the RNA-guided nuclease is a nickase, and optionally lacks RuvC activity.

54. The genome editing system of claim 49, further comprising a second guide RNA.

55. A CRISPR-mediated method of altering a cell, comprising:
introducing a first DNA single strand break (SSB) or double strand break (DSB) within a region selected from the group consisting of Chr 11 (NC_000011.10): 5,249,198-5,249,362 (Region 3); 5,249,591-5,249,712 (Region 4); 5,250,464-5,250,549 (Region 10); 5,250,594-5,250,735 (Region 11); 5,253,425-5,254,121 (Region 12); 5,254,122-5,254,306 (Region 13); 5,254,511-5,254,648 (Region 14); 5,255,255-5,255,292 (Region 20); and 5,255,518-5,255,641 (Region 21).

56. The CRISPR-mediated method of claim 55, wherein the first SSB or DSB is repaired by the cell in a manner that alters the regulation of an HBG1 gene or an HBG2 gene.

57. The CRISPR-mediated method of claim 55, wherein the first SSB or DSB results in the formation of at least one indel, insertion or deletion in the region selected from the group consisting of Chr 11 (NC_000011.10): 5,249,198-5,249,362 (Region 3); 5,249,591-5,249,712 (Region 4); 5,250,464-5,250,549 (Region 10); 5,250,594-5,250,735 (Region 11); 5,253,425-5,254,121 (Region 12); 5,254,122-5,254,306 (Region 13); 5,254,511-5,254,648 (Region 14); 5,255,255-5,255,292 (Region 20); and 5,255,518-5,255,641 (Region 21).

58. The CRISPR-mediated method of claim 55, wherein the SSB or DSB is formed via an editing event by a genome editing system, comprising:
an RNA-guided nuclease; and
at least one guide RNA (gRNA) comprising a targeting domain complementary to a sequence within one or more regions selected from the group consisting of Chr 11 (NC_000011.10): 5,249,198-5,249,362 (Region 3); 5,249,591-5,249,712 (Region 4); 5,250,464-5,250,549 (Region 10); 5,250,594-5,250,735 (Region 11); 5,253,425-5,254,121 (Region 12); 5,254,122-5,254,306 (Region 13); 5,254,511-5,254,648 (Region 14); 5,255,255-5,255,292 (Region 20); and 5,255,518-5,255,641 (Region 21).

59. The CRISPR-mediated method of claim 58, wherein the at least one gRNA comprises:
(a) the targeting domain differing by no more than 3 nucleotides from a sequence selected from the group consisting of SEQ ID NOs: 1331-44, 1346-47, 1350-77, 1380, 1382-83, 1401-02, 1405-15, 1421, 1442-44, 1446, 1547, 1552-54, 1556-63, 1586, 1592-93, 1633-39; or
(b) the targeting domain consisting of positions 5-20 of a sequence selected from the group consisting of SEQ ID NOs: 1331-44, 1346-47, 1350-77, 1380, 1382-83, 1401-02, 1405-15, 1421, 1442-44, 1446, 1547, 1552-54, 1556-63, 1586, 1592-93, 1633-39.

60. The CRISPR-mediated method of claim 59, further comprising
(a) the targeting domain differing by no more than 3 nucleotides from a Tier 1 or Tier 2 targeting domain sequence selected from the group consisting of SEQ ID NOs: 1331-47, 1350-62, 1364-77, 1380, 1382-83, 1402, 1414, and 1446; or
(b) the targeting domain consisting of positions 5-20 of a Tier 1 or Tier 2 targeting domain sequence selected from the group consisting of SEQ ID NOs: 1331-47, 1350-62, 1364-77, 1380, 1382-83, 1402, 1414, and 1446.

61. The CRISPR-mediated method of claim 60, wherein the targeting domain comprises a Tier 1 or Tier 2 targeting domain sequence selected from the group consisting of SEQ ID NOs: 1331-47, 1350-62, 1364-77, 1380, 1382-83, 1402, 1414, and 1446.

62. The CRISPR-mediated method of claim 58, wherein the RNA-guided nuclease is a nickase, and optionally lacks RuvC activity.

63. The CRISPR-mediated method of claim 58, further comprising a second guide RNA.
